United States Patent Application Publication US 2024/0033347 A1 - sequence listing, part 3

SEQ ID NO: 92 - DNA, 197577 bp, Vaccinia virus
  source 1..197577: mol_type = genomic DNA
  misc_feature 1..197577: note = VIR127
atcaaagagagaaagagaataaaaatatttttgtaaaactttttttatgagaccatcaaagagagaaagagaataaaaatatttttgtaaaactttttttatgagaccatcagaaagaggtttaatatttttgtgataccctgaaaggaaataggaataggaataggaatagtgtcataatcgtatcacactattgagacagaaaaagaagaagtcgcgagaggtaactttttgtgaatgtagttaagaacatttttgttttgcaaaccggaatatagtgtccggtacacttttttaattcgtggtgtgcctgaatcgttcgattaaccctactcatccaatttcagatgaatagagttatcgattcagacacacgctttgagttttgttgaatcgatgagtgaagtatcatcggttgcaccttcagatgccgatccgtcgacatacttgaatccatccttgacctcaagttcagatgattccttgcacatgtctccgatacgaacgctaaactctagattcttgacacattttgtatcgacgatcgttgaaccgatgatatcttcgtaactcactttcttatgagagatgttagacccgagtactggatgggtcttgatgtcgctgtctttctcttcttcgctacatctgatgtcgatagacacctcacagtctttgatcatagcaagagcttcttcatgagtgatcgcgggagagtccttaccttgtcctggggacacgctggacaatctagcattcactgtgtttccatcagcggattctgagatggatttaatctgaggacatttggtgaatccaaagttcattctcagacctccaccgatgatggagtaataagtggtaggaggatctacatcctcgactgatgtggaatcatcttctgattccacctcgggatttggatctgactcggactctgtaatttccgttacggattggcaaatcttatcattggtcggtgtttggtcttgctttgtgactttgataataacatcgattcccatatgatgtttgttttcttcttccgtacacgaggatgaggatgaggatgattgctgaagactggcaggcacatgcatgccaggacgatatattgtttcataattgctattgattgagtactgttctttatgattctacttccttaccatgcaataaattagaatatattttctacttttacgagaaattaattattgtatttattatttatgggtgaaaaacttactataaaaagcgggtgggtttggaattagtgatcagtttatgtatatcgcaactaccgggcatatggctatcgacatcgagaacattacccacatgataagagattgtatcagtttcgtagtcttgagtattggtattactatatagtatatagatgtcgacgctagatatacagtcgcccactagagttactgtctccgaatgcggcatgataccgtcatcattctttgctttcgttaactgtttggaggaagaatctttgttattgcatttaatctcgaaattcagagtgcacacctttctcctgtaaagaaacctgaagttgctaccttattaaggacagagaagtattcctcacgaaatacgggattacagtctttatgattcatagtaatagttagttccgacgttgagatggattcactgagaccggtagtggtcgtccgagtacacgacgtgtcgttgacgggatacagattaatttccacatcgatatagttaaaggtattactgggtacgggttcgcatttatctgcggaagagacggtgtgagaatatgttccgagaccacacggagaacagatgacgtctccggatactccgtatcctattccacattttgtttgggaaacacatgccttgcatccggatgatcctttgagaagacaataatatccgggagagcattcacagattctattgtgagtcgtgttacacgatcgcgtcttccgttacaacttagacaagcgggtaaatgattattgcgagatgtgaaggtacccgaaccacagggtgtacatcgtgtgttagtcttgctatcgcataatctggaagcgtatgttcccggacacaaattatggcgtttgtattcgttgtctttacactttccatcggatggtgcatgcggtgctatatctcttccgtttattattatacatgagagaaacaatatatacgagtataatacggacttcatgatttaataatgtagtaatcgtcgtcttgttcctgtttcctacttctccaatcatatagatattttctttctatcatggataatatttgtaatggttctttccgtacaacatactgtttagatgatattgcgcataatttccggaggcaaatacgatagtctagattgaccgatggtagactctaatttattgagtgctttgtcgacgagtttacttttatgctccatcgatagatggcactgttctatgagatcgtcgtacatgggaaatgaaatgtgtctgtccgaatgtatggctttaagatagctgtgataccgtatacaggtcggtgtcggagattcgaatctctttaaggcgacttatgtcacgatgatggaatctatcttatcgaatgatatatttttcataaatacacttttatagtcctcgtttaaacagaatttactatgtagttccgcgaatgactcgtcccttaataggcagtaggctagtatcttttttacgtagtaatcgtcgtagggagagaattctgacatcttgtagaacaacgatttaatcataggtagagatactttcagtctgtggtggatgatgtcattcacaacatccgccttgtatatgatgtttctgttttcaaacaccaagtcgaataccgtctttagtcggaaggttgatgtcgtatccgatgtatgaggcaacattgttgttacaattttgaaaggcggtattatagtattcgtctttctgaatgtcgaacctatctagtagataccgtagtatattgagagtgtatccttgattatgttttatgaatagataaagtagatgttgtccttcttccttttgttcgtgccaattgagtaacattatgagaatatgacctgttgcacaatcgttccatgatgggtgtacaatcaagattattacgtatcctcgtatcggctcctcgagataaaagagcatacaccacacgaggactatgtttggtatactgttgaaggtaagtgtgtaaccgcgttaatgtttgctccataatctattatcgcgtagatgaatcgcttctcggctcgcatcttagtgtgacttaacttgtaataattgcttttgtagaacgtggatatgtgtttacagtagtaatgaagagaagtgagtccatcctcgtcgacgcaattagggtcggatcctttgtacagaacgtaatagtttaagctcccattgaatttatatctaagataacacagcaatagatcggatgatttactaaagtcatcaatggtgtccgttagtatatcaaagatcttgttatcgattgatagtgaatgaatcagatagtggtgtagaggaatatgtcctttttcatccttgctatcaaagttacgcatgccgtggtgtaacaatatctttaatacagatggattaaatcgtgtattcatcgtatagcaatgtaatggagagttacctcgtttattcagatcgcagtgtttaataactagcttaaacagatgagacgatgtatccacatcaaagaacgtaaaatacatatgacaaacattgttgacagaaacgtgaccttcattcttaccgtcgtccataaatacgttaggtatgtaccacatactgtcgcgaacgatgcgtacaatctcgtccatctcataatgatttactttttcataattaaagatgtgaaagaaaaccgaacaatatatttttttagtaatgtttatgcgagacatataaaataaactccgtgtttatgatgccggtaaatgtttttatcatcttggacggaatcgattttgtaatatgtcatggaaacaaatgaaacaggacattatcgctccatgataaattatttaatggagtaataaagtatctccatgggtaatttcgaaatcaagttatcgtctgtattaatgttgtccactatggagtcgatcctctcattgttctttacagtttctgtaatgatggacgttagttcttttttgtaccatttgatgtcggattctttgcgtatctcaatctgtggcgtttgcttcgtttaaataatatatcaaacatggagacgcctgatatgtaggcattcttcattctattaatgtctactctatagcgctttagttccttatgacgaccggagatatcatacttactttagaaggaaaatcatcatctaggattaaggcgtatctgatacaggcgaataatggttcaggatatagatagcgtatatctctattaaatgcgtcaatcatagtctctagagtgggatggtagctaagtaataaatcaactatcctcgttttgttttctcttctgtaactacttttctggatggccgtattgattatcgagcgtgatgttgtaacactcgctccatattccaataaccgctttgcaaattgtatattattgacatcgaccgcgtaatatagtagagttttattctcattatcgatcatatctatattatccatgtacttgcttagtatatcaaatacatctattagtatggtttcataacagtgatacccgcaattattaaatctcgataatatcagaccgtacatacatagacggccattgttcgatacgtgatttacagccatgtgtccattattttccacgataaaccttacgacgtttacatcgacgagattattattaacaaagtagtcgtgcagaggatagttgttgtccgttatctaacatgcatcgaacgaccatatcgccgtaatgtaagtagtttatcaacatggcttgtacgatggattcatcctgttgtctaaatctctttagaatgttatcgatgatgtagtggttatagtctctggaatcgtaagaagtaatactacgcattacgtcgacaagagtatgacgtctctcaataagaagattaacgatttccatgtctacattatatggggttactctaaatcgcttgtttagataatccgcctctaatatagggctgacgtcgtatactctacacgtgtccacatcctttattaataatttaacaatctctatatctatggttgagcaagaccagtagtattggatgggtaaagatcctccttcgtctctgccatggatggaaacattgttattgatcaaacatttaattacatccttggatagagattgagattctctatgagacgatatatagtaatgaagagagttcttacacatatcactgtcgtacatacaggtacgaaatacgtaaccggtgctgtaacattctgatttaagaagccatagcaatacttctggtctcggattaggcgtcgttacgtatatatccaccaatccgagaccattgattgcataattcgtattcttggacggacgtatccgtttatccacaattaggtattttagcagacgtaagtcgatattatccgaagacatatacgaatacagatcgaaatcatttatattcgacttgagttcgttagaggaattcgaatagctggatatcagtagatgcacaatttgagattttacgtatctatgcttactgtatgctcctagcggagttaatccttcgttgtttctacaaagtctctcgactccgcgagagagtaacagtcgaacaatcttaatgtctgtatcgcatttattgaagacgtaacaatgtagcgcattgtttcctcgtctatctatatgttttgataagttgtgacacgtttcaatttctagttttatttttttgtacgtcacatcttcatccagtagacgacatagaatacatgtgcaatccatagctattctggtgctaattattcctatttcacgaaaaatgatgaaggcaatcattcctcataagatgataaaaagtgtagtgagagagcatgaaggagatttagtatttagcagtgcggatatgatccaagagggtgagatagtcgttctcgttcagaatctttcgcagcataagtagtatgtcgatatacttatcgttgaagactcttccagagacgatagctgattgagtacaaagtccaatgattgcacgaagttcttcggcggttttcatggagtcatttctgatgaaacatttaatgatctccacgcaattgtcgatattgtcccacggaagtgaatccttcaactcaccaccaaagagctccgttgcatcagttctgaaagagatgagaagcctgtagagagaccctgcgctttctctatgggtccatctatgagaaacccacaggatgtattcagtcagacaatgtctgacgtcggccacggtattcagggagtccttagtagcgtggcaatgacagggtctgaactgggcacaaggagaggccattgtaaaggtagacctgtagccgtttatgctaatagagggctttaatttccatttttttaatgggttgtggatgaggaatgagagtgatatcatattgagatacgtagttatgtagaggtgtatttcctatattatttactttcggtttcatattttaccaactctttaataaatttcttttcacgatgcatcttattaaatgacgttttctcataagtggacatatagatgcagaagtaatgaagaaaagtattacctctatcatctacataattagggtctgctcctttttttaacaacttatacagtacgtagtagtagtttatcggttttaaatcaagtctagaatatatagtggattaatatatttttatattagctaaagctatctatactatcagaaagcatatcattctcaacttcatcatgagttaaatatttgtgtaatggatgtcatgaacattaaacgtattcatgacatactcctttaataggttttttaaaacagatgattcaaatccttcattcattagataacagtgtaacggagtcgtaccttctactagtttgtttatatcacagcattctacaaacagtctaaacaatagagaagacggacagactttaacgtataaatgacacatgttatcgatattcgttgatgaattattattaaacgtagttatgataaatgattctaacgacatctctcgctagagataaaatctagtatcgtatcattaaacatctttgcatcatactcgcatagcatagtttttcataattaatacaatatttaaaagacttattcggaaagtattttaatacatgtatcatcgatggagatccatatgaggagtcacttgtagttcttcagtagtaataacagtgctatcatcgatagtataattatatgtagaaggttcatatgttgttgtaattggagtaactgttggtagttcttccgtggaatcaataattatactaacagcaatagtataattatataaatatgttccgttgatatcacatattttaatgaactcatttctaacaccctcagctatatctgtccaattaaatgtagccaacaatctactacgttctctttgattgactacttgtacggtagcgacgctacactatctttattgtcttctacatgctccaattgaatgtcatgatacaacgcagtttttcttatgcatgtttcataacaccacgaacatgtcgcagtaagatatatagccagagataatttctgtaaattcatgattgccggtcataaacaagcccgtcaataattgtggctatatattcagtttatagagcaaaataattaagcacaatagcgcttaatctcaaaatatgttatgtttatttttttcatattaaacatactggttaaaatcctctaaaggctgatcttcatctataaatcaagatcataattacatttagacagtggtttcatgtttataaaaatgttctttttgtgtgaataaggaatatactaatcaataatcaaccatcgaccccattacgatagtatgcaggcaaccccccattagagaggtacgtgtaatcagtctctccagttttagtatttttataagtcattgttacataaacggcttttaaacagtctcctcgataataagccatatctggaaatttattaaatactcgagtcattttacgcacggtcaaaaaagtaagtaatgtcgacgacttcttacattctatagaaacacctagaatactcattttcttttggaaaatatcctcagactctgatttgaacaatgcacgacctatagtaaaccgtgaccaataagttatattagtcaatggtatatccaaaccatcaggtgtggatagtacgccgatagtccagtctttggtatcgatagtgtagttattgaactgagaagttaccgtatagtctttttggtcatctctaaacaaggaaactaatacctctacactattgaacgatttatcttccgtaatgggtggaataacgggaatataaagtggactagcgatggatgaagtcacgaatataagacacgctattaatccgtatatcatcattttgatattacttataataacgatttgtttaatttttagtttatactattaattgtaaatgatattattatttttttaagtattatcagctttagtttatactattactatttgtaatatttagacatagataaacgtgataaaagtctatttgtttatatttattgcggatagcagtatttccctataaaaagtatacgtcctgtgttgtctttaatcatgtacatgaatggatggtttatgtagaccttcgtacgatataccatcgaaaagttagtcataaatactcctgtaacggccgatgcttctgtatactcctcattaacatctataaacgtcgtatgtagaaatttttctacagtgatagtttcattacacatcttgctaaaatctgcataatatccgaatatattagtaagtcctaaattttctaaaatcggtaccagattatacggttctgtcatttccactttaaactttggcatatacaagtctatacttttagtagataacataccacaccattttttaaatttttcatctgttatatttttttctatgttatatataccttctatgtcgtccggtagtataattaccatactagagtttccctcgtatggaatatcgataatagagaatcctccgaataattcattaatatgtacatattgcaagttattctcggtacccaccatcatatcaacactggtaactatattcttagaaatataaaacttgtctgtatatgtaagatgtttagaaaatggatatttccacattgctttaaaatggacggcgctaacaactgtcatacgagtattaatggatagcggactagtcaataaggaattaattttaccatttgtcatcgtcttaacccattcgttgattagttcctttgtttggttagcattattaaagtttacagtttgaaaatcgtcttttattttttgtaggaaggaggcgtggaactcgatactatcgctaccgtatattttatttgcggtagctagtgtcgcacaatacggaatatctacgtccatgtcattattgtcatccttcttatcatcgggtgtattctcattcatattctctatatattttgatagttgttcagctgtagaaccagctgctccatgatttagaatagataaagtagataaaatagaaactggagaaatcaaaacattttcatcagggtgttttaagattagttctttaaagatatccatggtatagaccaaacaataacgataacgatatatatcataaataaataatgttaaatttcagtttatgtttgtaccccgtattcatacttaacaaattggtattgcgtacacaatcaatcatattacataccattaataatgcaagcataaaaaatcgttagtagatgtttctaaatataggttccgtaagcaaagaatataagaatgaagcggtaatgataaaatcaatcgttatctaaaatgatcatactcatttattttattctattatattaacacatacatttttaacagcaacacattcaatattgtattgttatttttatattatttacacaattaacaatatattattagtttatattactgaattaataatataaaattcccaatcttgtcataaacacacactgagaaacagcataaacacaaaatccatcaaaaatgtcgatgaaatatctgatgttgttgttcgctgctatgataatcagatcattcgccgatagtggtaacgctatcgaaacgacattgccagaaattacaaacgctacaacagatattccagctatcagattatgcggtccagagggagatggatattgtttacacggtgactgtatccacgctagagatatcgacggtatgtattgtagatgctctcatggttatacaggcattagatgtcagcatgtagtattagtagactatcaacgttcagaaaaaccaaacactacaacgtcatatatcccatctcccggtattgtgcttgtattagtaggcattattattatgtgttgtctattatctgtttataggttcactcgaagaactaataaactacctctacaagatatggttgtgccataatttttataaatttttttatgagtatttttacaaaaaaaatgtataaagtgtatgtcttatgtatatttataaaaatgctaagtatgcgatgtatctatgttatttgtatttatctaaacaatacctctacctctagatattatacaaaaattttttatttcggcatattaaagtaaaatctagttaccttgaaaatgaatacagtgggtggttccgtatcaccagtaagaacataatagtcgaatacagtatccgattgagattttgcatacaatactagtctagaaagaaatttgtaatcattttctgtgacgggagtccatatatctgtatcatcgtctagtttatcagtgtcccatgctatatttctgttatcatcattagttaatgaaaataactctcgtgcttcagaaaagtcaaatattgtatccatacatacatctccaaaactatcgcttatacgtttatctttaacgatacctatacctagatggttatttactaacagacattttccagatctattgactataactcctatagtttccacatcaaccaagtaatgatcatctattgttatataacaataacataactcttttccatttttatcagtatgtatatctatatcaacgtcgtcgttgtagtgaatagtagtcattgatctattatatgaaacggatatgtctagaacggcaattgtcttacgtccagttaacactttcgttgatttaaagtctagagtctttgcaaacataatatccttatccgactttatatttcctgtagggtggtataattttattttgcctccacatatcggtgtttccaaatatattactagacaatattccatatagttattagttaagggtacccaattagaacacgtacgcttattatcatcatttggatcgtatttcataaaagttattgtactatcgatgtcaacacattctacattttttaatcgtctatatagtatttttctgatattttctataatatcagaattgtcttccatcggaagttgtatactatcggaatcagttacatgtttaaataattctctgatgtcattccttatacaatcaaattcattattaaacagtttaatagtctgtagacctttatcgtcgtaaatatccattgtcttattagttacgcttatttttatgtgttttacgttgctttattatattttataagaatgattgtttgacgaatcacgagaactattaagacacattattaggtatatattataaaaaagtttttgattacgatgttataagaggaaagaggacacattaacatcatacatcaattaactacattcttataacatcgtaatcaaaagaattgcaattttgatgtataacaactgtcaatgggttatggaattgtatattacatattatacggtatgttggtaacgacaaataccgatcggtaatcgtttgccggtgtaatagaattatatatatctatctattacaccggctgagtatacataataataagttgtggtagtatgatctccatatttataatttaggactttgtattcagtatttttggaatcataaaaaataaaaaaaagttttactaatttaaaatttaaaaagtatttacatttttttcactgtttagtcgcggatatggaattcgatcctgccaaaatcaatacatcatctatagatcatgtaacaatattacaatacatagatgaaccaaatgatataagactaacagtatgcattatccgaaatattaataacattacatattatatcaatatcacaaaaataaatacacatttggctaatcaatttcgggcttggaaaaaacgtatcgccggaagggactatatgactaacttatctagagatacaggaatacaacaatcaaaacttactgaaactatacgtaactgtcaaaaaaatagaaacatatatggtctatatatacactacaatttagttattaatgtggttattgattggataaccgatgtgattgttcaatcaatattaagagggttggtaaattggtacatagctaataatacctatactccaaatacacccaataatacaacaaccatttctgagttggatatcatcaaaatactaaataaatacgaggacgtgtatagagtaagtaaagaaaaagaatgtggaatttgctatgaagttgtttactcaaaacgattagaaaacgatagatactttggtttattggattcgtgtactcatatattttgcataacatgcatcaatatatggcataaaacacgaagagaaaccggtgcgtcggataattgtcctatatgtcgtacccgttttagaaacataacaatgagcaagttctataagctagttaactaataaataaaaagtttaatttgttgacgacgtatgtcgttattttttctcgtataaaagattaatttgattctaatataatctttagtattggataaatatcaattcaaattaattccattagattatatcataaataaaaatagtagcacgcactacttcagccaaatattcttttttgaaacgccatctatcgtagtgaggacacaagtgaacctataatgagcaaatttattagtatcggttacatgaaggactttacgtagagtggtgattccactatctgtggtacgaacggtttcatcttctttgatgccatcacccagatgttctataaacttggtatcctcgtccgatttcatatcctttgccaaccaatacatatagctaaactcaggcatatgttccacacatcctgaacaatgaaattctccagaagatgttacaatgtctagatttggacatttggtttcaaccgcgttaacatatgagtgaacacacccatacatgaaagcgatgagaaataggattttcatcttgccaaaatatcactagaaaaaatttatttatcaattttaaaggtataaaaaatacttattgttgctcgaatattttgtatttgatggtatacggaagattagaaatgtaggtattatcatcaactgattctatggttttatgtattctatcatgtttcactattgcgttggaaataatatcatatgcttccacatatattttattttgttttaactcataatactcacgtaattctggattattggcatatctgtgaataattttagctccatgatcagtaaatattaatgagaacatagtattaccacctaccattatttttttcatttcgttcaattcttgattgcaaagatctatataatcattatagcgttgacttatggactctggaatcttagacgatgtacagtcatctataatcatggcatatttaatacattgttttatagcatagtagttatctacgatgttagatatttctctcaatgaatcaatcacacaatctaatgtaggtttatgacataatagcattttcagcagttcaatgtttctagattcgttgatggcaatggctatacatgtatatccgttatttgatctaatgttgacatctgaaccggattctagcagtaaagatactagagattgtttattatatctaacagccttgtgaagaagtgtttctcctcgtttgtcaatcatgttaatgtctttaagataaggtaggcaaatgtttatagtactaagaattgggcaagcataagacatgtcacaaagaccctttttgtatgtataagtgtagaaattataacatccatagttggatttacataggtgtccaatcgggatctctccatcatcgagatgattgacggcatctcccccttccttttttagtagatatttcatcgtgtaagaatcaatattaatatttctaaagtatccgtgtatagcctctttatttaccacagctccatattccaacatgcattccactaaagggatatcgatatcgccgaatgtcatatactcaattagtatatgttggaggacatccgagttcattgttttcaatatcaaagagatggtttccttatcatttctccatagtggtacaatactacacattattccgtgaggctttccattctccaaaaacaatttgaccaaatctacatctttattgtatctataatcactatttagataatcagccataattcctcgagtgcaacatgttagatcgtctatatatgaataagccgtgttatctattcctttcattaacaatttaacgatgtctatatctatatgagatgacttaatataatattgaagagctgtacaatagtttttatctatagaagacggcttgattccgtgattaattagacatttaacaacttccggacgcacatatgctctcgtatccgactctgaatacagatgagagatgatatacagatgcaatacggtaccgcaatttcgtagttgataatcatcatacgcgtatccgtactcgtcctcataaagaacactgcagccattttctatgaacaaatcaataattttaggaacaggatcattgtcattacataattttctataactgaacgatggttttcacatttaacactcaagtcaaatccatgttctaccaacacctttatcaagtcaacgtctacatttttggatttcatatagctgaatatattaaagtcatttatgttgctaaatccagtggcttctagtagagccatcgctatatcctttaactttaacatgtctactatttgtgtattcttctaatggggtagctgtctccaatttttgcgtaatggattagtgccactgtctagtagtagtttgacgacctcgacattattacaatgctcattaaaaaggtatgcgtgtaaagcattattcttgaattggttcctggtatcattaggatctctgtctctcaacatctgtttaagttcatcgagagccacctcctcattttccaaatagtcaaacattttgactgaatagaagtgaatgagctactgtgaactctatacacccacacaactaatgtcattaaatattatttttttgaatgtatttataccatgtcaaaaacttgtacaattattaataaaaataatttagtgtttaaattttaccagttccagattttacacctccgttaaccccactttttacaccactggacgaccctcctccccacattccaccgccaccagatgtataagttttagatcctttattactaccatcatgtccatggataaagacactccacatgccgccactaccccctttagaagacatattaataagacttaagagttaaggacaagtttaacaataaaattaatcacgagtaccctactaccaacctacactattatatgattatagtttctatttttacagtaccttaactaaagtttctagtcacaagagcaatactaccaacctacactattatatgattatagtttctatttttataggaacgcgtacgagaaaatcaaatgtctaatttctaacggtagtgttgataaacgattatcgtcaatggatacctcctctatcatgtcgtctattttcttactttgttctattaacttattagcattatatattatttgattataaaacttatattgcttattagcccaatctgtaaatatcggattattaacatatcgtttctttgtaggtttatttaacttgtacatcactgtaagcatgtccgtaccatttattttaatttgacgcatatccgcaatttctttttcgcagtcggttataaattctatatatgatggatacatgctacatgtgtacttataatcgactaatatgaagtacttgatacatattttcagtaacgatttattattaccacctatgaataagtacctgtgatcgtctaggtaatcaactgttttcttaatacattcgatggttggtaatttactcagaataatttccaatatcttaatatataattctgctatttctggaatatatttatctgccagtataacacaaatagtaatacatgtaaacccatattttgttattatattaatgtctgcgccattatctattaaccattctactaggctgacactatgcgacttaatacaatgataaagtatactacatccatgtttatctattttgtttatatcatcaatatacggcttacaaagttttagtatcgataacacatccaactcacgcatagagaaggtagggaataatggcataatatttattaggttatcatcattgtcattatctacaactaagtttccattttttaaaatatactcgacaactttaggatctctattgccaaatttttgaaaatatttatttatatgcttaaatctatataatgtagctccttcatcaatcatacatttaataacattgatgtatactgtatgataagatacatattctaacaatagatcttgtatagaatctgtatatcttttaagaattgtggatattaggatattattacgtaaactattacacaattctaaaatataaaacgtatcacggtcgaataatagttgatcaactatataattatcgattttgtgatttttcttcctaaactgtttacgtaaatagttagatagaatattcattagttcatgaccactatagttactatcgaataacgcgtcaaatatttcccgtttaatatcgcatttgtcaagataataatagagtgtggtatgttcacgataagtataataacgcatctctttttcgtgtgaaattaaatagtttatcacgtccaaagatgtagcataaccatcttgtgacctagtaataatataataatagagaactgttttacccattctatcatcataatcagtggtgtagtcgtaatcgtaatcgtctaattcatcatcccaattataatattcaccagcacgtctaatctgttctattttgatcttgtatccatactgtatgttgctacatgtaggtattcctttatccaataatagtttaaacacatctacattgggatttgatgttgtagcgtatttctctacaatattaataccatttttgatactatttatttctatacctttcgaaattagtaatttcaataagtctatatcgatgttatcagaacatagatattcgaatatatcaaaatcattgatatttttatagtcgactgacgacaataacaaaatcacaacatcgtttttgatattattatttttcttggtaacgtatgcctttaatggagtttcaccatcatactcatataatggatttgcaccactttctatcaatgattgtgcactgctggcatcgatgttaaatgttttacaactatcatagagtatcttatcgttaaccatgattggttgttgatgctatcgcattttttggtttctttcatttcagttatgtatggatttagcacgtttgggaagcataagctcatatgatttcagtactgtagtgtcagtactattagtttcgatcagatcaatgtctagatctatagaatcaaaacacgataggtcagaagataatgaatatctgtaggcttcttgttgtactgtaacttctcgttttgttagatggttgcatcgtgctttaacatcaatggtacaaattttatcctcgctttgtgtatcatattcgtccctactataaaattgtatattcagattatcatgagatgtgtatacgctaacggtatcaataaacggagcacaccatttagtcataaccgtaatccaaaaatttttaaagtatatcttaacgaaagaagttgtgtcattgtctacggtgtatggtactagatcctcataagtgtatatatctagagtaatgtttaatttatcaaatggttgataatatggatcctcatggcaatttcctaagacgaaaataagacataaacacgcaataaatctaattgcggacatggttactccttaaaaaaatactaataatcaccttggctatttagtaagtgtcatttaacactatactcatattaatccatggactcataatctctatacgggattaacggatgttctatatacggggatgagtagttctcttctttaactttatactttttactaatcatatttagactgatgtatgggtaatagtgtttgaagagctcgttctcatcatcagaataaatcaatatctctgtttttttgttatacagatgtattacagcctcatatattacgtaatagaacgtgtcatctaccttattaactttcaccgcatagttgtttgcaaatacggttaatcctttgacctcgtcgatttccgaccaatctgggcgtataatgaatctaaactttaatttcttgtaatcattcgaaataatttttagtttgcatccgtagttatcccctttatgtaactgtaaatttctcaacgcgatatctccattaataatgatgtcgaattcgtgctgtatacccatactgaatggatgaacgaataccgacggcgttaatagtaatttactttttcatctttacatattgggtactagttttactatcataagtttataaattccacaagctactatggaataagccaaccatcttagtataacacacatgtcttaaagtttattaattaattacatgttgttttatatatcgctacgaatttaaacagagaaatcagtttaggaaaaaaaattatctatctacatcatcacgtctctgtattctacgatagagtgctactttaagatgagacatatccgtgtcatcaaaaatatactccattaaaatgattattccggcagcgaacttgatattggatatatcacaacctttgttaatatctacgacaatagacagcagtcccatggttccataaacagtgagtttatctttctttgaagagatattttgtagagatcttataaaactgtcgaatgacatcgcatttatatctttagctaaatcgtatatgttaccatcgtaatatctaaccgcgtctatcttaaacgtttccatcgctttaaagacgtttccgatagatggtctcatttcatcagtcatactgagccaacaaatataatcgtgtataacatctttgatagaatcagactctaaagaaaacgaatcggctttattatacgcattcatgataaacttaatgaaaaatgtttttcgttgtttaagttggatgaatagtatgtcttaataattgttattatttcattaattaatatttagtaacgagtacactctataaaaacgagaatgacataactaatcataactagttatcaaagtgtctaggacgcgtaattttcatatggtatagatcctgtaagcattgtctgtattctggagctattttctctatcgcattagtgagttcagaatatgttataaatttaaatcgaataacgaacataactttagtaaagtcgtctatattaactcttttattttctagccatcgtaataccatgtttaagatagtatattctctagttactacgatctcatcgttgtctagaatatcacatactgaatctacatccaattttagaaattggtctgtgttacatatctcttctatattattgttgatgtattgtcgtagaaaactattacgtagaccattttctttataaaacgaatatatagtactccaattatctttaccgatatatttgcacacataatccattctctcaatcactacatctttaagattttcgttgttaagatatttggctaaactatataattctattagatcatcaacagaatcagtatatatttttctagatccaaagacgaactctttggcgtcctctataatattcccagaaaagatattttcgtgttttagtttatcgagatctgatctgttcatatacgccatgattgtacggtacgttatgataaccgcataaaataaaaatccattttcatttttaaccaatactattcataattgagattgatgtaatactttgttactttgaacgtaaagacagtacacggatccgtatctccaacaagcacgtagtaatcaaatttggtgttgttaaacttcgcaatatttatcaatttagatagaaacttatactcatcatctgttttaggaatccatgtattattaccactttccaacttatcattatcccaggctatgtttcgtccatcatcgttgcgcagagtgaataattcttttgtattcggtagttcaaatatataatccatgcatagatcggtaaagctattgtagatgtgatttttcctaaatctaatataaaactcgtttactagcaaacactttcctgatttatcgaccaagacacatatggtttctaaatctatcaagtggtggggatccatagttatgacgcagtaacatagattattaccttcttaactgtcgctaatatctatatatttattgttatcgtattggattctgcatatagatggcttgtatgtcaaagatatagaacacataaccaatttatagtcgcgctttacattctcgaatctaaagttaagagatttagaaaacattatatcctcggatgatgttatcactgtttctggagtaggatatattaaagtctttacagatttcgtccgattcaaataaatcactaaataatatcccacattatcatctgttagagtagtatcattaaatctattatattttatgaaagatatatcactgctcacctctatatttcgtacatttttaaactgtttgtataatatctctctgatacaatcagatatatctattgtgtcggtagacgataccgttacatttgaattaatggtgttccattttacaacttttaacaagttgaccaattcatttctaatagtatcaaacgctccatgattaaatattttaatagtatccattttatatcactacggacacaaagtagctgacataaaccattgtataatttttatgttttatgtttattagcgtacacattttggaagttccggcttccatgtatttcctggagagcaagtagatgatgaggaaccagataggttatatccgtacttgcacttaaagtttacattgtcgttgtatgagtatgatcttttaaacccgctagacaagtatccgtttgatattgtaggatgtggacatttaacaatctgacacgtgggtggatcggaccattctcctcctgaacacaggacaccagagttaccaatcaacgaatatccactattgcaactataagttacaacgcttccatcggtataaaaatcctcgtatccgttatgtcttccgttggatatagatggaggggattggcatttaacagattcacaaataggtgcctcgggattccataccatagatccagtagatcctaattcacaatacgatttagattcaccgatcaaatgatatccgctattacaagagtacgttatactagagccaaagtctactccgccaatatcaagttggccattatcgatatctcgaggcgatgggcatctccgtttaatacattgattaaagagtgtccatccagtacctgtacatttagcatatataggtcccattttttgctttctgtatccaggtagacatagatattctatagtgtctcctatgttgtaattagcattagcatcagtctccacactattcttaaatttcatattaatgggtcgtgacggaatagtacagcatgatagaacgcatcctattcccaacaatgtcaggaacgtcacgctctccaccttcatatttatttatccgtaaaaatgttatcctggacatcgtacaaataataaaaagcccatatatgttcgctattgtagaaattgtttttcacagttgctcaaaaacgatggcagtgacttatgagttacgttacactttggagtctcatctttagtaaacatatcataatattcgatattacgagttgacatatcgaacaaattccaagtatttgattttggataatattcgtattttgcatctgctataattaagatataatcaccgcaagaacacacgaacatctttcctacatggttaaagtacatgtacaattctatccatttgtcttccttaactatatatttgtatagataattacgagtctcgtgagtaattccagtaattacatagatgtcgccgtcgtactctacagcataaactatactatgatgtctaggcatgggagacttttttatccaacgatttttagtgaaacattccacatcgtttaatactacatatttttcatacgtggtataaactccacccattacatatatatcatcgtttacgaataccgacgcgcctgaatatctaggagtaattaagtttggaagtcttatccatttcgaagtgccgtgtttcaaatattctgccacacccgttgaaatagaaaattctaatcctcctattacatataactttccattgttaacacaagtactaacttctgattttaacgacgacatattagtaaccgttttccattttttcgtttcaagatctacccgcgatacggaataaacatgtctattgttaatcatgccgccaataatgtatagacaattatgtaaaacatttgcattatagaattgtctatctgtattaccgactatcgtccaatattctgttctaggagagtaatgggttattgtggatatataatcagagtttttaatgactactatattatgttttataccatttcgtgtcactggctttgtagatttggatatagttaatcccaacaatgatatagcattgcgcatagtattagtcataaacttgggatgtaaaatgttgatgatatctacatcgtttggatttttatgtatccactttaataatatcatagctgtaacatcctcatgatttacgttaacgtcttcgtgggataagatagttgtcagttcatcctttgataattttccaaattctggatcggatgtcaccgcagtaatattgttgattatttctgacatcgacgcattatatagttttttaattccatatcttttagaaaagttaaacatccttatacaatttgtggaattaatattatgaatcatagtttttacacatagatctactacaggcggaacatcaattattatggcagcaactagtatcatttctacattgtttatggtgatgtttatcttcttccagcgcatatagtctaatagcgattcaaacgcgtgatagtttataccattcaatataatcgcttcatcctttagatggtgatcctgaatgcgtttaaaaaaattatacggagatgccgtaataatttccttattcacttgtataatttccccattgatagaaaatatcacgctttccattcttgaagtactataagtaattatagtataatgtaaaggtttatatattcaatattttttataaaaaaatcatttcgacattaattcctttttaaatttccgtctatcatctatagaaacatattctatgaatttataaaatgcttttacgtgtcctatcgtaggcgatagaaccgctaaaaagcctattgaatttctacaaaagaatctattatatggtatagggagagtataaaacattaaatgcccgtacttattaaagtattcagtagccaatcctaactctttcgaatacttattaatggctcttgttctgtacgaatctatttttttgaacaacggacctagtggtatatcttgttctatgtatctaaaataatgtctgactagatccgttagtttaatatcctcagtcatcttgtctagaatggcaaatctaactgcgggtttaggctttagtttagtttttatatctacatctatgtctttatctaacaccaaaaatataatagctaatattttattacaatcatccggatattcttctacgatctcactaactaatgtttctttggttatactagtatagtcactatcggacaaataaagaaaatcagatgatcgatgaataatacatttaaattcatcatctgtaagatttttgagatgtctcattaaaatattattagggtcagtactcattatcattaggcagctattacttattttattatttttcaccatatagatcaatcattagatcatcaaaatatgtttcaatcatcctaaagagtatggtgaatgactcttcccatctaatttctgaacgttcaccaatgtctctagccactttggcactaatagcgatcattcgcttagcgtcttctatattattaactggttgattcaatctatctagcaatggaccgtcggacagcgtcattctcatgttcttaatcaatgtacatacatcgccgtcatctaccaattcatccaacaacataagctttttaaaatcatcattataataggtttgatcgttgtcatttctccaaagaatatatctaataagtagagtcctcatgcttagtaatttaactattttagttaacaactattttttatgttaaatcaattagtacaccgctatgtttaatacttattcatattttagtttttaggattgagaatcaatacaaaaattaatgcatcattaattttagaaatacttagtttccacgtagttaatgaaacatttgaactcatcgtacaagacgttctcgtacaggacgtaactataaaccggtttatatttgttcaagatagatacaaatccgataactttttttacgaattctacgggatccactttaaaagtgtcataccgggttctttttatttttttaaacagatcaatggtgtgatgttgattaggtcttttacgaatttgatatagaatagcgtttacatattctccataatggtcaatcgccatttgttcgtatgtcataaattctttaattatatgacactgtgtattgtttagttcatccttgttcattgttaggaatctatccaaaatggcaattatactagaactataggtgcgttgtatacacatattgatgtgtctgtttatacaatccatgatatttggatccatgctactaccttcgggtaaaattgtagcatcatataccatttctagtactttaggttcattattatccattgcagaggacgtcatgatcgcatcctaaaaaaatatattatttttatgttattttgttaaaaataatcatcgaatacttcgtaagatactccttcatgaacataatcagttacaaaacgtttatatgaagtaaagtatctacgatttttacaaaagtccggatgcataagtacaaagtacgcgataaacggaataataatagatttatctagtctatctttttctatagctttcatagttagatacatggtctcagaagtaggattatgtaacatcagcttcgataaaatgactgggttatttagtcttacacattcgctcatacatgtatgaccgttaactacagagtctacactaaaatgattgaacaatagatagtctaccattgtttcgtattcagatagtacagcgtagtacatggcatcttcacaaattatatcattgtctaatagatatttgacgcatcttatggatcccacttcaacagccatcttaaaatcggtaaaatcatattgctttcctttatcattaataatttctaaaacatcatctctatcataaaagatacaaatattaactgtttgatccgtaataacattgctagtcgatagcaatttgttaataagatgcgctgggctcaatgtcttaataagaagtgtaagaggactatctccgaatttgttttgtttattaacatccgttgatggaagtaaaagatctataatgtctacattcttgactgttttagagcatacaatatggagaggtgtatttccatcatgatctggttttgagggactaattcctagtttcatcatccatgagattgtagaagcttttggattgtctgacataagatgtctatgaatatgatttttgccaaatttatccactatcctggcttcgaatccgatggacattatttttttaaacactctttctgaaggatctgtacacgccaacaacggaccacatccttcttcatcaaccgagttgttaatcttggctccatactgtaccaataaatttattctctctatgacttcatcatctgttcccgagagataatatagaggcgttttatgctgtttatcacacgcgtttggatctgcgccgtgcgtcagcagcatcgcgactattctattattattaattttagaagctatatgcaatggataatttccatcatcatccgtctcatttggagagtatcctctatgaagaagttcttcgacaaatcgttcatctagtcctttaattccacaatacgcatgtagaatgtgataattatttccagaaggttcgatagcttgtagcatattcctaaatacatctaaatttttactattatatttggcataaagagatagataatactcggccgacataatgttgtccattgtagtataaaaattaatatttctatttctatttctgtatatttgcaacaatttactctctataacaaatatcataacttagttcttttatgtcaagaaggcactggtttagttcatctataaatgtcacgccataactaccacgcatgctatactcagaattatgataaagatatttatccttggggtgtaggtaatggggattaatctttgttggatcagtctctaagttaacacatgtcacacatgatccatttatagttatatcacacgatgatgatttatgaattgattccggaagatcgctatcgtattttgtggttccacaattcatttccatacatgttattgtcacactaatattatgatgaactttatctagccgctgagtggtaaacaacagaacagatagtttattatctttaccaacaccctcagccgctgccacaaatctctgatccgtatccatgatggtcatgtttatttctagtccgtatccagtcaacactatgttagcatttctgtcgatatagctttcactcatatgacactcaccaataatagtagaattaatgtcgtaatttacaccaatagtgagttcggcggcaaagtaccaataccggtaatcttgtcgaggaggacatatagtattcttgtattctaccgaatacccgagagatgcgatacaaaagagcaagactaatttgtaaaccatcttactcaaaatatgtaacaatagtacgatgcaatgagtaagacaataggaaatctatcttatatacacataattattctatcaattttaccaattagttagtgtaatgttaacaaaaatgtgggagaatctaattagtttttctttacacaattgacgtacatgagtctgagttccttgtttttgctaattatttcatccaatttattattcttgactatatcgagatcttttgtataggagtcagacttgtattcaacatgcttttctataatcattttagctatttcggcatcatccaatagtacattttccagattagcagaatagatattaatgtcgtatttgaacagagcctgtaacatctcaatgtctttattatctatagccaatttaatgtccggaatgaagagaagggaattattggtgtttgtcgacgtcatatagtcgagcaagagaatcatcatatccacgtgtccattttttatagtggtgtgaatacaactaaggagaatagccagatcaaaagtagatggtatttctgaaagaaagtatgatacaatacttacatcattaagcatgacggcatgataaaatgaagttttccatccagttttcccatagaacatcagtctccaatttttcttaacaaacagttttaccgtttgcatgttaccactatcaaccgcataatacaatgcagtgtttcccttgtcatcaaattgtgaatcatccagtccactgaatagcaaaatctttactattttggtatcttccaatgtggctgcctgatgtaatggaaattcattctctagaagatttttcaatgctccagcgttcaacaacgtacatactagacgcacgttattatcagctattgcataatacaaggcactatgtccatggacatccgccttaaatgtatctttactagagagaaagcttttcagctgcttagacttccaagtattaattcgtgacagatccatgtctgaaacgagacgctaattagtgtatattttttcattttttataattttgtcatattgcaccagaattaataatatctctaatagatctgattagtagatacatggctatcgcaaaacaacatatacacatttaataaaaataatatttattaagaaaattcagatttcacgtacccatcaatataaataaaataatgattccttacaccgtacccatattaaggagattccaccttacccataaacaatataaatccagtaatatcatgtctaatgatgaacacaaatggtgtattaaattccagtttttcaggagatgatctcgccgtagctaccataatagtagatgcctctgctacagttccttgttcgtcgacatctatctttgcattctgaaacattttataaatatataatgggtccctagtcatatgtttaaacgacgcattatctggattaaacatactaggagccatcatttcggctatcgacttaatatccctcttattttcgatagaaaatttagggagtttaagattgtacactttattccctaattgaaacgaccaatagtctaattttgcagccgtaatagaatctgtgaaatgggtcatattatcacctattgccaggtacatactaatattagcatccttatacggaaggcgtaccatgtcatattctttgtcatcgattgtgattgtatttccttgcaatttagtaactacgttcatcatgggaaccgttttcgtaccgtacttattagtaaaactagcattgcgtgttttagtgatatcaaacggatattgccatgtacctttaaaatatatagtattaatgattgcccatagagtattattgtcgagcatattagaatctactacattagacataccggatctacgttctactatagaattaattttattaaccgcatctcgtctaaagtttaatctatataggccgaatctatgatattgttgataatacgacggtttaatacacacagtattatctacgaaactttgataagttagatcagtgtacgtatatttagatgttttcagcttagctaatcctgatattaattctgtaaatgctggacccagatctctttttctcaaatccatagtcttcaataattctattctagtattacctgatgcaggcaatagcgacataaacatagaaaacgaatagccaaacggcgagaagacaatattatcatcttgaatatttttatacgctactataccggcattggtaaatccttgcagacgataggtagacgctgaacacgttaacgatagtatcaataacgcaatcatgattttatggtattaataattaaccttatttttatgttcggtataaaaaaattattgatgtctacacatccttttgtaattgacatctatatatccttttgtataatcaactctaatcactttaacttttacagttttccctaccagtttatccctatattcaacatatctatccatatgcatcttaacactctctgccaagatagcttcagagtgaggatagtcaaaaagataaatatatagagcataatccttctcgtatactctgccctttattacatcgcccgcattgggcaacgaataacaaaatgcaagcatcttgttaacgggctcgtaaattgggataaaaattatgtttttatatctattttattcaagagaatattcaggaatttctttttccggttgtatctcgtcgcagtatatatcatttgtacattgtttcatattttttaatagtttacaccttttagtaggactagtatcgtacaattcatagctgtattttgaattccaatcacgcataaaaatatcttccaattgttgacgaagacctaatccatcatccggtgtaatattaatagatgctccacatgtatccgtaaagtaatttcctgtccaatttgaggtacctatataggccgttttatcggttaccatatatttggcatggtttaccctagaatacggaatgggaggatcagcatctggtacaataaatagctttacttctatatctatgtttttagattttagcatagcgatagatcttaaaaagtttctcatgataaacgaagatcgttgccagcaactaatcaatagcttaacggatacttgtctgtctatagcggatcttcttaattcatcttctatataaggccaaaacaaaattttacccgccttcgaataaataatagggataaagttcataacagatacataaacgaatttactcgcatttctaatacatgacaataaagcggttaaatcattggttctttccatagtacatagttgttgcggcgcagaagcaataaatacagagtgtggaacaccacttacgttaatactaagaggatgatctgtattataatacgacggataaaagtttttccaattatatggtagattgttaactccaagataccagtatacctcaaaaatttgagtgagatccgctgccaagttcctattattgaagatcgcaatacccaattctttgacctgagttagtgatctccaatccatgttagcgcttcctaaataaatatgtgtattatcagatatccaaaattttgtatgaagaactcctcctaggatatttgtaatatctatgtatcgtacttcaactccggccatttgtagtctttcaacatcctttaatggtttgttagatttattgacggctactctaactcttactcctcttttgggtaattgtacaatctcgtttaatattatcgtgccgaaattcgtacccacttcatccgataaactccaataaaaagatgatatatctagtgtttttgtggtattggatagaatttccctccacatgttaaatgtagacaaatatactttatcaaattgcatacctataggaatagtctctgtaatcactgcgattgtattatccggattcattttatttgttaaaaaataatcctatatcacttcactctattaaaaatccaagtttctatttctttcatgactgattttttaacttcatccgtttccttatgaagatgatgtttggcaccttcataaatttttatttctctattacaatttgcatgttgcatgaaataatatgcacctaaaacatcgctaatctcattgtttgttccctggagtatgagagtcgggggggtgttaatcttggaaattatttttctaaccttgttggtagccttcaagacctgactagcaaatccagccttaattttttcatgattgattaatgggtcgtattggtatttataaactttatccatatctctagatactgattctggacatagctttccgactggcgcatttggtgtgatggttcccataagtttggcagctagcagattcagttttgaaacagcatctgcattaactagaggagacattagaatcattgctgtaaacaagtttggattatcgtaagaggctagtatagaaattgttgctcccatggaatgacccaataagtagatttaatagttaccacgtgctgtaccaaagtcatcaatcatcattttttcaccattacttcttccatgtccaatatgatcatgtgagaatactaaaattcctaacgatgatatgttttcagctagttcgtcataacgtccagaatgtttaccagctccatgacttatgaatactaatgccttaggatatgtaataggtttccaatatttacaatatatgtaatcattgtccagattgaacatacagtttgcactcatgattcacgttatataactatcaatattaacagttcgtttgatgatcatattatttttatgttttattgataattgtaaaaacatacaattaaatcaatatagaggaaggagacggatactgtcttttgtgagatagtcatggcgactaaatcagattatgaggatgctgttttttactttgtggatgatgataaaatatgtagtcgcgactccatcatcgatctaatagatgaatatatcacgtggagaaatcatgttatagtgtttaacaaagatattaccagttgtggaagactgtacaaggaattgatgaagttcgatgatgccgctatacagtactatggtattgataaaattaatgagattgtcgaagctatgagcgaaggagaccactacatcaattttacaaaagtccatgatcaggaaagtttattcgctaccataggaatatgtgctaaaatcactgaacattggggatacaaaaagatttcagaatctagattccaatcattgggaaacattacagatctgatgaccgacgataatataaacatcttgatactttttctagaaaaaaaattgaattgatgatataggggtcttcataacgcataattattacgttagcattctatatccgtgttaaaaaaaattatcctatcatgtatttgagagttttatatgtagcaaacatgatagctgtgatgccaataagctttagatattcacgcgtgctagtgttagggatggtattatctggtggtgaaatgtccgttatataatctacaaaacaatcatcgcatatagtatgcgatagtagagtaaacatttttatcgtttctactgggttcatacatcgtctacccaattcggttatgaatgaaattgtcgccaatcttacacccaaacccttgttatccattagcatagtattaacttcgttatttatgtcataaactgtaaatgattctgtagatgccatatcatacatgatattcatgtccctattataatcattactaactttatcacaatatatgttgataatatctatatatgatctagtctttgtgggcaactgtctatacaagtcgtctaaacgttgtttactcatatagtatcgaacagccatcattacatggtcccgttccgttgatagataatcgagtatgttagtggacttgtcaaatctatataccatattttctggaagtggatatacatagtcgtgatcaacattattgctagcctcatcttctatatcctgtactataccattatctatatcatctacataatctacgatattattatacataaacatcgacaacatactattgtcaattatctaagtcctgttgatccaaacccttgatctcctctatctgtactatctagagattgtacttcttccagttctggataatatatacgttgatagattagctgggctattctatcccccgtatttacattaaacgtacattttccattattaataagaataactcctatgtttcccctataatcttcgtctattacaccgcctcctatatcaatgccttttagggacagaccagacctaggagctattctaccatagcagaacttaggcatggacatactaatatctgtcttaattaactgtcgttctccaggagggatagtataatcgtaagcgctatataaatcatatccggcggcgtaaggtgattgcctagtaggagatttagctctgttagtttccttaacaaatctaactggtgagttaatattcatgttgaacataaaactaatattttatttcaaaattatttaccatcccatatattccatgaataagtgtgatgattgtacacttctatagtatctatatacgattcacgataaaatcctcctatcaatagcagtttattatccactatgatcaattctggattatccctcggataaataggatcatctatcagagtccatgtattgctggattcacaataaaattccgcatttctaccaaccaagaataaccttctaccgaacactaacgcgcatgatttataatgaggataataagtggatggtccaaactgccactgatcatgattgggtagcaaatattctgtagttgtatcagtttcagaatgtcctcccattacgtatataacattgtttatagatgccactgctggattacatctaggtttcagaagactcggcatattaacccaagcagcatccccgtggaaccaacgctcaacagatgtgggatttggtagacctcctactacgtataatttattgttagcgggtatcccgctagcatacagtctggggctattcatcggaggaattggaatccaattgtttgatatataatttacagctatagcattgttatgtatttcattgttcatccatccaccgatgagatatactacttctccaacatgagtacttgtacacatatggaatatatctataatttgatccatgttcataggatactctatgaatggatacttgtatgatttgcgtggttgtttatcacaatgaaatattttggtacagtctagtatccattttacattatttatacctctgggagaaagataatttgacctgattacatttttgataaggagtagcagatttcctaatttatttcttcgctttatataccacttaatgacaaaatcaactacataatcctcatctggaacatttagttcatcgctttctagaataagtttcatagatagataatcaaaattgtctatgatgtcatcttccagttccaaaaagtgtttggcaataaagtttttagtatgacataagagattggatagtccgtattctatacccatcatgtaacactcgacacaatattcctttctaaaatctcgtaagataaagtttatacaagtgtagatgataaattctacagaggttaatatagaagcacgtaataaattgacgacgttatgactatctatatatacctttccagtatatgagtaaataactatagaagttaaactgtgaatgtcaaggtctagacaaacccttgtaactggatctttatttttcgtgtatttttgacgtaaatgtgtgcgaaagtaaggagataactttttcaatatcgtagaattgactattatattgccacctatagcatcaataattgttttgaatttcttagtcatagacaatgctaatatattcttacagtacacagtattaacaaatatcggcatttatgtttctttaaaagtcaacatctagagaaaaatgattatctttttgagacataactcccattttttggtattcacccacacgtttttcgaaaaaattagtttttccttccaatgatatattttccatgaaatcaaacggattggtaacattataaatttttttaaatcccaattcagaaatcaatctatccgcgacgaattctatatatgttttcatcatttcacaattcattcctataagtttaactggaagagccgcagtaagaaattcttgttcaatggatactgcatctgttataatagatctaacggtttcttcactcggtggatacaataaatgtttaaacatcaaacatgcgaagtcgcagtgtagaccctcgtctctactaattagttcgttggaaaacgtgagtccgggcattaggccacgctttttaagccaaaatatggaagcgaatgatccggaaaagaagattccttctactgcagcaaaggcaataagtctctctccataaccggcgctgtcatgtatccacttttgagcccaatcggccttcttttttacacaaggcattgtttctatggcattaaagagatagtttttttcattactatctttaacataagtatcgatcaaaagactatacatttccgaatgaatgttttcaatggccatctgaaatccgtagaaacatctagcctcggtaatctgtacttctgtacaaaatcgttccgccaaattttcattcactattccgtcactggctgcaaaaaacgccaatacatgttttataaaatatttttcgtctggtgttagtttattccaatcattgatatctttagatatatctacttcttccactgtccaaaatgatgcctctgcctttttatacatgttccagatgtcatgatattggattgggaaaataacaaatctatttggatttggtgcaaggatgggttccataactaaattaacaatatcaataaattttttttcagttatctatatgcctgtacttggattttttgtacatcgatatcgccgcaatcactacaataattacaagtattattgatagcattgttattagtactatcataattaaattatcgacattcatgggtgctgaataatcgttattatcatcattatcattttgtaattgtgacatcatactaaataaatcgtttgcgagattgttgtgggaagcgggcatggaggatgcattatcattattatttaacgccttccatttggattcacaaatatggcgcgcgttcaacattttatggaaactataattttgtgaaaacagataacaagaaaactcgtcatcgttcaaatttttaacgatagtaaaccgattaaacgtcgagctaatttctaacgctagcgactctgttggatatgggtttccagatatatatcttttcagttcccctacgtatctataatcatctgtaggaaatggaagatatttccatttatctactgttcctaatatcatatgtggtggtgtagtagaaccattaagcgcgaaagatgttatttcgcatcgtattttaacttcgcaataatttctggttagataacgcactctaccagtcaagtcaatgatattagcctttacagatatattcatagtagtcgtaacgatgactccatcttttagatgcgatactcctttgtatgtaccagaatcttcgtacctcaaactcgatatatttaaacaagttaatgagatattaacgcgttttatgaatgatgatatataaccagaagttttatcctcggtggctagcgctataaccttatcattataataccaactagtgtgattaatatgtgacacgtcagtgtgggtacaaatatgtacattatcgtctacgtcgtattcgatacatccgcatacagccaacaaatataaaatgacaaatactctaacgccgttcgtacccatcttgatgcggtttaataaatgttttgatttcaatttattgtaaaaaaagattcggttttatactgttcgatattctcattgcttatattctcatctatcatctccacacagtcaaatccgtggttagcatgcacctcatcaaccggtaaaagactatcggactcttctatcattataactctagaatatttaatttggtcattattaatcaagtcaattatcttatttttaacaaacgtgagtattttactcattttttataaaaacttttagaaatatacagactctatcgtgtgtctatatcttctttttatatccaatgtatttatgtctgatttttcttcatttatcatatataatggtccaaattctacacgtgcttcggattcatccagatcattaaggttcttataattgtaacatccttctcttccctcttctacatcttccttcttattcttattcttagcgtcacagaatctaccacagcaggatcccatgacgagcgtcatattaaactaatccattttcaattataatatatgattagtaatgaccattaaaataaaaaatattcttcataaccggcaagaaagtgaaaagttcacattgaaactatgtcagtagtatacatcatgaaatgatgatatatatatactctattttggtggaggattatatgatataattcgtggataatcattcttaagacacatttcttcattcgtaaatcttttcacgttaaatgagtgtccatattttgcaatttcttcatatgatggcggtgtacgtggacgaggctgctcctgttcttgttgtggtcgccgactgtcgtgtttgcgtttatccctccattatcgcgattgcgtagatggagtactattatataccttgtaattaaatttttttattaattaaacgtataaaaacgttccgtatctgtatttaagagccagatttcgtctaatagaacaaatagctacagtaaaaataactagaataattgctacacccactagaaaccacggatcgtaatacggcaatcggttttcgataataggtggaacgtatattttatttaaggacttaacaattgtctgtaaaccacaatttgcttccgcggatcctgtattaactatctgtaaaagcatatgttggccgggcggagccgaacattctccgatatccaatttctgtatatctataatattattaacctccgcatacgcattacagttcttttctagcttggataccgcactaggtacatcgtctagatctattcctatttcctcagcgatagctcttctatccttttccggaagcaatgaaatcacttcaataaatgattcaaccatgagtgtgaaactaagtcgagaattactcatgcatttgttagttattcggagcgcgcaatttttaaactgtcctataacctctcctatatgaatagcacaagtgacattagtagggatagaatgttgagctaatttttgtaaataactatctataaaaagattatacaaagttttaaactctttagtttccgccatttatccagtctgagaaaatgtctctcataataaatttttccaagaaactaattgggtgaagaatggaaacctttaatctatatttatcacagtctgttttggtacacatgatgaattcttctaatgccgtactaaattcgatatctttttcgatttctggatatgtttttaataaagtatgaacaaagaaatggaaatcgtaataccagttatgtttaactttgaaattgttttttattttcttgttaatgattccagccacttgggaaaagtcaaagtcgtttaatgccgatttaatacgttcattaaaaacaaactttttatcctttagatgaattattattggttcattggaatcaaaaagtaagatattatcgggtttaagatctgcgtgtaaaaagttgtcgcagcatggtagttcgtagattttaatgtataacagagccatctgtaaaaagataaactttatgtattgtaccaaagatttaaatcctaatttgatagctaactcggtatctactttatctgccgaatacagtgctaggggaaaaattataatgtttcctctttcgtattcgtagttagttctcttttcatgttcgaaaaagtgaaacatgcggttaaaatagtttataacattaatattactgttaataactgccgggtaaaagtgggatagtaatttcacgaatttgatactgtcctttctctcgttaaacgcctttagaaaaactttagaagaatatctcaatgatagttcctgaccatccatagtttgtatcaataatagcaacatatgaagaacacgtttatacagagtatgtaaaaatgttaatttatagtttaatcccatggcccacgcacacacgattaattttttttcatctccctttagattgttgtatagaaatttgggtactgtgaactccgccgtagtttccatgggactatataattttgtggcctcgaatacaaattttactacatagttatctatcttaaaaactataccatatcctcctgtagatatgtgataaaaatcgtcgtttataggataaaatcgtttatccttttgttggaaaaaggatgaattaatgtaatcattctcttctatctttagtagtgtttccttattaaaattcttaaaataatttaacaatctaactgacggagcccaattttggtgtaaatctaattgggacattatattgttaaaatacaaacagtctcctaatataacagtatctgataatctatggggagacatccattgatattcaggggatgaatcattggcaacacccatttattgtacaaaaagccccaatttacaaacgaaagtccaggtttgatagagacaaactattaactattttgtctctgtttttaacacctccacagtttttaatttctttagtaatgaaattattcacaatatcagtatcttctttatctaccagagattttactaacttgataaccttggctgtctcattcaatagggtagtaatatttgtatgtgtgatattgatatctttttgaattgtttcttttagaagtgattctttgatggtgccagcatacgaattacaataatgcagaaactcggttaacatgcaggaattatagtaagccaattccaattgttgcctgtgttgtattagagtgtcaatatgagcaatggtgtccttgcgtttctctgatagaatgcgagcagcgattttggcgttatcatttgacgatatttctggaatgacgaatcctgtttctactaactttttggtaggacaaagtgaaacaatcaagaagatagcttctcctcctatttgtggaagaaattgaactcctctagatgatctactgacgatagtatctccttgacagatattggaccgaattacagaagtacctggaatgtaaagccctgaaaccccctcattttttaagcagattgttgccgtaaatcctgcactgtgaccaagatagagagctcctttggtgaatccatctctatgtttcagtttaaccaagaaacagtcagctggtctaaaatttccatctctatctaatacagcatctaacttgatgtcaggaactatgaccggtttaatgttatatgtaacattgagtaaatccttaagttcataatcatcactgtcatcagttatgtacgatccaaacaatgtttctactggcatagtggatacgaagatgctatccatcagaatgtttccctgattagtattttctatatagctattcttctttaaacgattttccaaatcagtaactatgttcatttttttaggagtaggacgcctagccagtatggaagaggattttctagatcctctcttcaacatctttgatctcaatggaatgcaaaaccccatagtgaaacaaccaacgataaaaataatattgtttttcactttttataattttaccatctgactcatggattcattaatatctttataagagctactaacgtataattctttataactgaactgagatatatacaccggatctatggtttccataattgagtaaatgaatgctcggcaataactaatggcaaatgtataaaacaacgaaattatactagagttgttaaagttaatattttctatgagctgttccaataaattatttgttgtgactgcgttcaagtcataaatcatcttgatactatccagtaaacagtctttaagttctggaatattatcatcccattgtaaagcccctaattcgactatcgaatatcctgctctgatagcagtttcaatatcgacggacgtcaatactgtaataaaggtggtagtattgtcatcatcgtgataaactacgggaatatggtcgttagtaggtacggtgactttacacaacgcgatatataactttccttttgtaccatttttaacgtagttgggacgtcctgcagggtattgttttgaagaaatgatatcgagaacagatttgatacgatatttgttggattcctgattattcactataatataatctagacagatagatgattcgataaatagagaaggtatatcgttggtaggataatacatccccattccagtattctcggatactctattgatgacactagttaagaacatgtcttctattctagaaaacgaaaacatcctacatggactcattaaaacttctaacgctcctgattgtgtctcgaatgcctcgtacaaggatttcaaggatgccatagattctttgaccaacgatttagaattgcgtttagcatctgatttttttattaaatcgaatggtcggctctctggtttgctaccccaatgataacaatagtcttgtaaagataaaccgcaagaaaatttatacgcatccatccaaataaccctagcaccatcggatgatattaatgtattattatagattttccatccacaattattgggccagtatactgttagcaacggtatatcgaatagattactcatgtaacctactagaatgatagttcgtgtactagtcataatatctttaatccaatctaagaaatttaaaattagattttttacactgttaaagttaacaaaggtattacccggatacgtggatatcatatatggcattggtccattatcagtaatagctccataaactgatacggcgatggtttttatatgtgtttgatctaacgaggaagaaattcgcgcccacaattcatctctagatatgtatttaatatcaaacggtaacacatcaatttcgggacgcgtatatgtttctaaatttttaatccaaatataatgatgacctatatgccctattatcatactgtcaactatagtacacctagagaacttacgatacatctgtttcctataatcgttaaattttacaaatctataacatgctaaaccttttgacgacaaccattcattaatttctgatatggaatctgtattctcgataccgtattgttctaaagccagtgctatatctccctgttcgtgggaacgctttcgtataatatcgatcaacggataatctgaagtttttggagaataatatgactcatgatctatttcgtccataaacaatctagacataggaattggaggcgatgatcttaattttgtgcaatgagtcgtcaatcctataacttctaatattgtaatattcatcatcgacataacactatctatgttatcatcgtatattagtataccacggccttcttcatttcgtgccaaaataatatacagtcttaaataattacgcaatatctcaatagtttcataattgttagctgttttcatcaaggtttgtatcctgtttaacatgatggcgttctataacgtctctattttctatttttaattttttaaatttttaacgatttactgtggctagatacccaatctctctcaaatatttttttagcctcgcttacaagctgtttatctatactattaaaactgacgaatccgtgattttggtaatgggttccgtcgaaatttgccgaagtgatatgaacatattcgtcgtcgactatcaacaattttgtattattctgaatagtgaaaaccttcacagatagatcattttgaacacacaacgcgtctagacttctggcggttgccatagaatatacgtcgttcttatcccaattaccaactagaagtctgatcttaactcctctattaatggctgcttctataatggagttgtaaatgtcaggccaatagtagctattaccgtcgacacgtgtagtgggaactatggccaaatgttcaatatctatactagtcttagccgacttgagtttatcaataactacatcagtgtctagatctctagaatatcccaataggtgttctggagaatcagtaaagaacactccacctataggattcttaatatgatacgcagtgctaactggcagacaacaagccgcagagcataaattcaaccatgaattttttgcgctattaaaggctttaaaagtatcaaatcttctacgaagatctgtggccagcgggggataatcagaatatacacctaacgttttaatcgtatgtatagatcctccagtaaatgacgcgtttcctacataacatctttcatcatctgacacccaaaaacaaccgagtagtagtcccacattattttttttatctatattaacggttataaaatttatatccgggcagtgactttgtagctctcccagatttcttttccctcgttcatctagcaaaactattattttaatccctttttcagatgcctcttttagtttatcaaaaataagcgcgcccctagtcgtactcagaggattacaacaaaaagatgctatgtatatatatttcttagctagagtgataatttcgttaaaacattcaaatgttgttaaatgatcggatctaaaatccatattttctggtagtgtttctaccagcctacattttgctcccgcaggtaccggtgcaaatggccacatttagttaacataaaaacttatacatcctgttctatcaacgattctagaatatcatcggctatatcgctaaaattttcatcaaagtcgacatcacaacctaactcagtcaatatattaagaagttccatgatgtcatcttcgtttatttctatatccgtatccattgtagattgttgaccgattatcgagtttaaatcattactaatactcaatccttcagaatacaatctgtgtttcattgtaaatttataggcggtgtatttaagttggtagattttcaattatgtatcaatatagcaacagtagttcttgctcctccttgattctagcatcctcttcattattttcttctacgtacataagcatgtccaatacgttagacaacacaccgacgatggcggccgccacagacacgaatatgactagaccgatgaccatttaaaaacccctctctagctttcacttaaactgtatcgattattcttttagaacatgtataatataaaaacattattctatttcgaatttaggcttccaaaaatttttcatccgtaaaccgataataatatatatagacttgttaatagtcggaataaatagattaatgcttaaactatcatcatctccacgattagagatacaatatttacattctttttgctgtttcgaaactttatcaatacacgttaatacaaacccaggaaggagatattgaaactgaggctgttgaaaatgaaacggtgaatacaataattcagataatgtaaaatcatgattccgtattctgatgatattagaactgctaatggatgtcgatggtatgtatctaggagtatctattttaacaaagcatcgatttgctaatatacaattatcattttgattaattgttattttattcatattcttaaaaggtttcatatttatcaattcttctacattaaaaatttccatttttaatttatgtagccccgcaatactcctcattacgtttcattttttgtctataatatccattttgttcatctcggtacatagattatccaattgagaagcgcatttagtagttttgtacattttaagtttattgacgaatcgtcgaaaactagttatagttaacattttattatttgataccctgatattaatacccctgccgttactattatttataactgatgtaacccacgtaacattagaattaattatcgatagtaatgcatcgacgcttccaaaattgtctattataaactcaccgataatttttttattgcatgttttcatattcattaggattatcaaatctttaatcttattacgattgtatgcgttgatattacaagacgtcattctaaaagacggaggatctccatcaaatgccagacaatcacgtacaaagtacatggaaataggttttgttctattgcgcatcatagattcatatagaacacccatagaaatactaatttgttttactctataaaatactaatgcatctatttcatcgttttgtataacgtctttccaagtgccaaattccaaatttttttcattgatagtaccaaattcttctatctctttaactacttgcatagataggtaattacagtgatgcctacatgccgttttttgaaactgaatagatgcgtctagaagcgatgctacactagtcacaatcaccactttcatatttagaatatatgtatgtaaaaatatagtagaatttcattttgtttttttctatgctataaatgaattctcattttgcatctgctcatactccgttttatatcaataccaaagaaggaagatatctggttctaaaagccgttaaagtatgcgatgttagaactgtagaatgcgaaggaagtaaagcttcctgcgtactcaaagtagataaaccctcatcgcccgcgtgtgagagaagaccttcgtccccgtccagatgcgagagaatgaataaccctggaaaacaagtcccgtttatgaggacggacatgctacaaaatatgttcgcggctaatcgcgataatgtagcttctagacttttgtcctaaaatactattatatccttttcgatattaataaatccgtgtcgtccaggttttttatctctttcagtatgtgaatagataggtattttatctctattcatcatcgaatttaagagatccgataaacattgtttgtattctccagatgtcagcatctgatacaacaatatatgtgcacataaacctctggcacttatttcatgtaccttccccttatcactaaggagaatagtatttgagaaatatgtatacatgatattatcatgaattagatatacagaatttgtaacactctcgaaatcacacgatgtgtcggcgttaagatctaatatatcactcgataacacattttcatctagatacactagacattttttaaagctaaaatagtctttagtagtgacagtaactatgcgattattttcatcgatgatacatttcatcggcatattattacgcttaccatcaaagactataccatgtgtatatctaacgtattctagcatggttgccatacgtgcattaaacttttcaggatctttggatagatcttccaatctatctatttgagaaaacatttttatcatgttcaatagttgaaacgtcggatccactatatagatattatctataaagattttaggaactacgttcatggtatcctggcgaatattaaaactatcaatgatatgattatcgttttcatcttttatcaccatatagtttctaagatatgggattttacttaatataatattatttcccgtgataaattttattagaaaggccaaatctataagaaaagtcctagaattagtctgaagaatatctatatcgccgtaccgtatatttggattaattagatatagagaatatgatccgtaacatatacaacttttattatggcgtctaagatattcttccatcaacttattaacatttttgactagggaagatacattatgacgtcccattacttttgccttgtctattactgcgacgttcatagaatttagcatatctcttgccaattcttccattgatgttacattataagaaattttagatgaaattacatttggagctttaatagtaagaactcctaatatgtccgtgtatgtggtcactaatacagattgtagttctataatcgtaaataatttacctatattatatgtttgagtctgtttagaaaagtagctaagtatacgatcttttatttctgatgcagatgtatcaacatcggaaaaaaatctttttttattcttttttactaaagatacaaatatgtctttgttaaaaacagttattttctgaatatttctagcttgtaattttaacatatgatattcgttcacactaggtactctgcctaaataggtttctataatctttaatgtaatattaggaagagtattctgatcaggattcctattcattttgaggatttaaaactctgattattgtctaatatggtctcaacacaaactttttcacagagcgatagagtttttgataactcgtttttcttaagaaatataaaactactgtttccagagctcgctctatcttttattttatctaattcgatacaaactcctgatactggttcagaaagtaattcattaattttcagtcctttatagaagatatttaatatagataatacaaaattttcagttcttgatatcgatctgattgatcctagaactagatatattaataacgtgctcattaggcagtttatggcagcttgataattagatatagtatattccagttcatatttattagataccgcattgcccagattttgatattctatgaattcctctgaaaataaatccaaaataactagacattctattttttgtggattagtgtactctcttccctctatcatgttcactactggtgtccacgatgataaatatctagagggaatataatatagtccataggatgccaatctagcaatgtcgaataactgtaatttgattcttcgttcttcattatgaattgattcttgaggtataaacctaacacaaattatattattagacttttcgtatgtaatgtctttcatgttataagtttttaatcctggaatagaatctattttaatgaggcttttaaacgcagagttctccaacgagtcaaagcataatactctgttgtttttcttatatacgatgttacgattttcttctttgaatggaataggtttttgaattagtttataattacaacataatagataaggaagtgtgcaaatagtacgcggaaaaaacataatagctcccctgttttcatccatggttttaagtaaatgatcactggcttctttagtcaatggatattcgaacattaaccgtttcatcatcattggacagaatccatatttcttaatgtaaagagtgatcaaatcattgtgtttattgtaccatcttgttgtaaatgtgtattcggttatcggatctgctcctttttctattaaagtatcgatgtcgatctcgtctaagaattcaactatatcgacatatttcatttgtatacacataaccattactaacgtagaatgtataggaagagatgtaacgggaacagggtttgttgattcgcaaactattctaatacataattcttctgttaatacgtcttgcacgtaatctattatagatgccaagatatctatataattattttgtaagatgatgttaactatgtgatctatataagtagtgtaataattcatgtatttcgatatatgttccaactctgtctttgtgatgtctagtttcgtaatatctatagcatcctcaaaaaatatattcgcatatattcccaagtcttcagttctatcttctaaaaaatcttcaacgtatggaatataataatctattttacctcttctgatatcattaatgatatagtttttgacactatcttctgtcaattgattcttattcactatatctaagaaacggatagcgtccctaggacgaactactgccattaatatctctattatagcttctggacataattcatctattataccagaattaatgggaactattccgtatctatctaacatagttttaagaaagtcagaatctaagacctgatgttcatatattggttcatacatgaaatgatctctattgatgatagtgactatttcattctctgaaaattggtaactcattctatatatgctttccttgttgatgaaggatagaatatactcaatagaatttgtaccaacaaactgttctcttatgaatcgtatatcatcatctgaaataatcatgtaaggcatacatttaacaattagagacttgtctcctgttatcaatatactattcttgtgataatttatgtgtgaggcaaatttgtccacgttctttaattttgttatagtagatatcaaatccaatggagctacagttcttggcttaaacagatatagtttttctggaacgaattctacaacattattataaaggactttgggtagataagtgggatgaaatcctattttaattaatgcgatagccttgtcctcgtgcagatatccaaacgcttttgtgatagtatggcattcattgtctagaaacgctctacgaatatctgtgacagatatcatctttagagaatatactagtcgcgttaatagtactacaatttgtattttttaatctatctcaataaaaaaattaatatgtatgattcaatgtataactaaactactaactgttattgataactagaatcagaatctaatgatgacgtaaccaagaagtttatctactgccaatttagctgcattatttttagcatctcgtttagattttccatctgccttatcgaatactcttccgtcgatgtctacacaggcataaaatgtaggagagttactaggccccactgattcaatacgaaaagaccaatctctcctagtaatttggcagtactcattaataacggtgacagggttagcacctttccaatcaataatttttttagccggaataacatcatcaaaagacttatgatcctctctcattgatttttcgcgggatacatcatctattatggcgtcagccataacatcagcatccggcttatccgcctccgttgtcataaaccaacgaggaggaatatcgtcggagctgtacaccatagcactacgttgaagatcgtacagagctttattaacttctcgcttctccatattaagttgtctagttagttgtgcagcagtagctccttcgattccaatggttttaatagcctcacacacaatctctgcgttagaacgttcgtcgatatagattttagacatttttagagagaactaacacaaccagcaataaaactgaacctactttatcatttttttattcatcatcctctggtggttcgtcgttcctatcgaatgtggatctgattaacccgtcatctataggtgatgctggttctggagattctggaggagatggattattatctggaagaatctctgttatttccttgttttcatgtatcgattgcgttgtaacattaagattgcgaaatgctctaaatttgggaggcttaaagtgttgtttgcaatctctacacgcatgtctaactagtggaggttcgtcagcggctctagtttgaatcatcatcggcgtagtattcctacttttacagttaggacacggtgtattgtatttctcgtcgagaacgttaaaataatcgttgtaactcacatcctttattttatctatattgtattctactcctttcttaatgcattttataccgaataagagatagcgaaggaattctttttcggtgccgctagtacccttaatcatatcacatagtgttttatattccaaatttgtggcaatagacggtttatttctatacgatagtttgtttctggaatcctttgagtattctataccaatattattctttgattcgaatttagtttcttcgatattagattttgtattacctatattcttgatgtagtactttgatgatttttccatggcccattctattaagtcttccaagttggcatcatccacatattgtgatagtaattctcggatatcagtagcggctaccgccattgatgtttgttcattggatgagtaactactaatgtatacattttccatttataacacttatgtattaactttgttcatttatattttttcattattatgttgatattaacaaaagtgaatatatatgttaataattgtattgtggttatacggctacaatttcataatgagtggaagtcagtgtccgatgatcaatgacgatagctttactctgaaaagaaagtatcaaatcgatagtgcggagtcaacaataaaaatggataagaagaggataaagtttcagaatagagccaaaatggtaaaagaaataaatcagacaataagagcagcacaaactcattacgagacattgaaactaggatacataaaatttaagagaatgattaggactactactctagaagatatagcaccatctattccaaataatcagaaaacttataaactattctcggacatttcagccatcggcaaagcatcacagaatccgagtaagatggtatatgctctgctgctttacatgtttcccaatttgtttggagatgaccatagattcattcgttatagaatgcatccaatgagtaaaatcaaacacaagatcttctctcctttcaaacttaatcttattagaatattagtggaagaaagattctataataatgaatgcagatctaataaatggagaataattggaacacaagttgataaaatgttgatagctgaatctgataaatatacaatagatgcaaggtataacctaaaacccatgtatagaatcaagggaaaatctgaagaagataccctcttcatcaaacagatggtagaacaatgtgtgacatcccaggaattggtggaaaaagtgttgaagatactgtttagagatttgttcaagagtggagaatacaaagcatacagatacgatgatgatgtagaaaatggatttattggattggatacactaaaattaaacattgttcatgatatagttgaaccatgtatgcctgttcgtaggccagtggctaagatactgtgtaaagaaatggtaaataaatactttgagaatccgctacatattattggtaaaaatcttcaagagtgcattgactttgttagtgaataggcatttcatctttctccaatactaattcaaattgttaaattaataatggatagtataaatagttattagtgataaaatagtaaaaataattattagaataagagtgtagtatcatagataactctcttctataaaaatggattttattcgtagaaagtatcttatatacacagtagaaaataatatagattttttaaaggatgatacattaagtaaagtaaacaattttaccctcaatcatgtactagctctcaagtatctagttagcaattttcctcaacacgttattactaaggatgtattagctaataccaatttttttgttttcatacatatggtacgatgttgtaaagtgtacgaagcggttttacgacacgcatttgatgcacccacgttgtacgttaaagcattgactaagaattatttatcgtttagtaacgcaatacaatcgtacaaggaaaccgtgcataaactaacacaagatgaaaaatttttagaggttgccgaatacatggacgaattaggagaacttataggcgtaaattatgacttagttcttaatccattatttcacggaggggaacccatcaaagatatggaaatcatttttttaaaactgtttaagaaaacagacttcaaagttgttaaaaaattaagtgttataagattacttatttgggcatacctaagcaagaaagatacaggcatagagtttgcggataatgatagacaagatatatatactctatttcaacaaactggtagaatcgtccatagcaatctaacagaaacgtttagagattatatctttcccggagataagactagctattgggtgtggttaaacgaaagtatagctaatgatgcggatatcgttcttaatagacacgccattaccatgtatgataaaattcttagttatatatactctgagataaaacaaggacgcgttaataaaaacatgcttaagttagtttatatctttgagcctgaaaaagatatcagagaacttctgctagaaatcatatatgatattcctggagatatcctatctattattgatgcaaaaaacgacgattggaaaaaatattttattagtttttataaagctaattttattaacggtaatacatttattagtgatagaacgtttaacgaggacttattcagagttgttgttcaaatagatcccgaatatttcgataatgaacgaattatgtctttattctctacgagtgctgcggacattaaacgatttgatgagttagatattaataacagttatatatctaatataatttatgaggtgaacgatatcacattagatacaatggatgatatgaagaagtgtcaaatctttaacgaggatacgtcgtattatgttaaggaatacaatacatacctgtttttgcacgagtcggatcccatggtcatagagaacggaatactaaagaaactgtcatctataaaatccaagagtagacggctgaacttgtttagcaaaaacattttaaaatattatttagacggacaattggctcgtctaggtcttgtgttagatgattataaaggagacttgttagttaaaatgataaaccatcttaagtctgtggaggatgtatccgcattcgttcgattttctacagataaaaaccctagtattcttccatcgctaatcaaaactattttagctagttataatatttccatcatcgtcttatttcaaaggtttttgagagataatctatatcatgtagaagaattcttggataaaagcatccatctaaccaagacggataagaaatatatacttcaattgataagacacggtagatcatagaacagaccaaatatattattaataatttgtatatacatagatataattatcacatattaaaaattcacacatttttgataaatgggaactgctgcaacaattcagactcccaccaaattaatgaataaagaaaatgcagaaatgattttggaaaaaattgttgatcatatagttatgtatattagtgacgaatcaagtgattcagaaaataatcctgaatatattgattttcgtaacagatacgaagactatagatctctcattataaaaagtgatcacgagtttgtaaagctatgtaaaaatcatgcagagaaaagttctccagaaacgcaacaaatgattatcaaacacatatacgaacaatatcttattccagtatctgaagtactattaaaacctataatgtccatgggtgacataattacatataacggatgtaaagacaatgaatggatgctagaacaactctctaccctaaactttaacaatctccgcacatggaactcatgtagcataggcaatgtaacgcgtctgttttatacattttttagttatctgatgaaagataaactaaatatataagtataatcccattctaatactttaacctgatgtattacctgcatcttattagaatattaacctaactaaaagacataacataaaaactcattacatagttgataaaaagcggtaggatataaatattatggctgccaccgttccgcgttttgacgacgtgtacaaaaatgcacaaagaagaattctagatcaagaaacattttttagtagaggtctaagtagaccgttaatgaaaaacacatatctatttgataattacgcgtatggatggataccagaaactgcaatttggagtagtagatacgcaaacttagatgcaagtgactattatcccatttcgttgggattacttaaaaagttcgagtttctcatgtctctatataaaggtcctattccagtatacgaagaaaaagtaaatactgaattcatagccaatggatcgttctctggtagatacgtatcatatcttcgaaagttttctgctcttccaacaaacgagtttattagttttttgttactgacttccattccaatctataatatcttgttctggtttaaaaatactcagtttgatattactaaacacacattattcagatacgtctatacagataatgccaaacacctggcgttggctaggtatatgcatcaaacaggagactataagcctttgtttagtcgtctcaaagagaattatatatttaccggtcccgttccaataggtatcaaagatatagatcaccctaatcttagtagagcaagaagtccatccgattatgagacattagctaatattagtactatattgtactttaccaagtatgatccggtattaatgtttttattgttttacgtacctgggtattcaattactacaaaaattactccagccgtagaatatctaatggataaactgaatctaacaaagagcgacgtacaactgttgtaaattattttatgcttcgtaaaatgtaggttttgaaccaaacattctttcaaagaatgagatgcataaaactttattatccaatagattgactatttcggacgtcaatcgtttaaagtaaacttcgtaaaatattctttgatcactgccgagtttaaaacttctatcgataattgtctcatatgttttaatatttacaagttttttggtccatggtacattagccggacaaatatatgcaaaataatatcgttctccaagttctatagtttctggattatttttattatattcagtaaccaaatacatattagggttatctgcggatttataatttgagtgatgcattcgactcaacataaataattctagaggagacgatctactatcaaattcggatcgtaaatctgtttctaaagaacggagaatatctatacatacctgattagaattcatccgtccttcagacaacatctcagacagtctggttttgtacatcttaatcatattcttatgaaacttggaaacatctcttctagtttcactagtacctttattaattctctcaggtacagattttgaattcgacgatgccgagtatttcatcgttgtatatttcttcttcgattgcataatcagattcttatataccgcctcaaactctattttaaaattattaaacaatactctactattaatcagtcgttctaactctttcgctatttctatagacttatctacatcttgactgtctatctctgtaaacacggagtcggtatctccatacacgctacgaaaacgaaatctgtaatctataggcaacgatgttttcacaatcggattaatatctctatcgtccatataaaatggattacttaatggattggcaaaccgtaacataccgttagataactctgctccatttagtaccgattctagatacaagatcattctacgtcctatggatgtgcaactcttagccgaagcgtatgagtatagagcactatttctaaatcccatcagaccatatactgagttggctactatcttgtacgtatattgcatggaatcataaatggccttttcagttgaactggtagcctgttttaacatctttttatatctggctctctctgccaaaaatgttcttaatagtctaggaatggttccttctatcgatctatcgaaaattgctatttcagagatgaggttcggtagtctaggttcacaatgaaccgtaatatatctaggaggtggatatttctgaagcaatagctgattatttatttcttcttccaatctattggtactaacaacgacaccgactaatgtttccggagatagatttccaaagatacacacattaggatacagactgttataatcaaagattaatacattattactaaacattttttgttttggagcaaataccttaccgccttcataaggaaacttttgttttgtttctgatctaactaagatagttttagtttccaacaatagctttaacagtggacccttgatgactgtactcgctctatattcgaataccatggattgaggaagcacatatgttgacgcacccgcgtctgtttttgtttctactccataatactcccacaaatactgacacaaacaagcatcatgaatacagtatctagccatatctaaagctatgtttagattataatccttatacatctgagctaaatcaacgtcatcctttccgaaagataatttatatgtatcattaggtaaagtaggacataatagtacgactttaaatccattttcccaaatatctttacgaattactttacatataatatcctcatcaacagtcacataattacctgtggttaaaacctttgcaaatgcagcggctttgcctttcgcgtccgtagtatcgtcaccgatgaacgtcatttctctaactcctctatttaatactttacccatgcaactgaacgcgttcttggatatagaatccaatttgtacgaatccaatttttcagatttttgaatgaatgaatatagatcgaaaaatatagttccattattgttattaacgtgaaacgtagtattggccatgccgcctactcccttatgactagactgatttctctcataaatacagagatgtacagcttcctttttgtccggagatctaaagataatcttctctcctgttaataactctagacgattagtaatatatctcagatcaaagttatgtccgttaaaggtaacgacgtagtcgaacgttagttccaacaattgtttagctattcgtaacaaaactatttcagaacatagaactagttctcgttcgtaatccatttccattagtgactgtatcctcaaacatcctctatcgacggcttcttgtatttcctgttccgttaacatctcttcattaatgagcgtaaacaataatcgtttaccacttaaatcgatataacagtaacttgtatgcgagattgggttaataaatacagaaggaaacttcttatcgaagtgacactctatatctagaaataagtacgatcttgggatatcgaatctaggtatttttttagcgaaacagttacgtggatcgtcacaatgataacatccattgttaatctttgtcaaatattgctcgtccaacgagtaacatccgtctggagatatcccgttagaaatataaaaccaactaatattgagaaattcatccatggtggcattttgtatgctgcgtttctttggctcttctatcaaccacatatctgcgacggagcattttctatctttaatatctagattataacttattgtctcgtcaatgtctatagttctcatctttcccaacggcctcgcattaaatggaggaggagacaatgactgatatatttcgtccgtcactacgtaataaaagtaatgaggaaatcgtataaatacggtctcaccatttcgacatctggatttcagatataaaaatctgttttcaccgtgactttcaaaccaattaatgcaccgaacatccatttatagaatttagaaatatattttcatttaaatgaatcccaaacattggggaagagccgtatggaccattatttttatagtactttcgcaagcgggtttagacggcaacatagaagcgtgtaaacgaaaactatatactatagtcagcactcttccatgtcctgcatgtagacggcacgcgactatcgctatagaggacaataatgtcatgtctagcgatgatctgaattatatttattattttttcatcagattatttaacaatttggcatctgatcccaaatacgcgatcgatgtgacaaaggttaaccctttataaacttaacccattataaaacttatgattagtcacaactgaaataaccgcgtgattattttttggtataattctacacggcatggtttctgtaactatgaattcaacccccgttacattagtgaaatctttaacaaacagcaagggttcgtcaaagacataaaactcattgtttacaatcgaaatagaccccctatcacacttaaaataaaaaatatccttatcctttaccaccaaataaaattctgattggtcaatgtgaatgtattcacttaacagttccacaaatttatttattaactccgaggcacatacatcgtcggtattttttatggcaaactttactcttccagcatccgtttctaaaaaaatattaacgagttccatttatatcatccaatattattgaaatgacgttgatggacagatgatacaaataagaaggtacggtacctttgtccaccatctcctccaattcatgctctattttgtcattaactttaatgtatgaaaacagtacgccacatgcttccatgacagtgtgtaacactttggatacaaaatgtttgacattagtataattgttcaagactgtcaatctataatagatagtagctataatatattctatgatggtattgaagaagatgacaaccttggcatattgatcatttaacacagacatggtatcaacagatagcttgaatgaaagagaatcagtaattggaataagcgtcttctcgatagagtgtccgtataccaacatgtctgatattttgatgtattccattaaattatttagttttttctttttattttcgttaaacagcatttctgtcaacggaccccaacatcgttgaccgattaagttttgattgatttttccgtgtaatgcgtatctagtcagatcgtatagcctatccaataatccatcatctgtgcgtagatcacatcgtacactttttaattctctatagaagagcgacagacatctggagcaattacagacagcaatttctttattctctacagatgtaagatacttgaagacattcctatgatgatgcagaattttggataacacggtattgatggtatctgttaccataattcctttgatggctgatagtgtcagagcacaagatttccaatctttgacaatttttagcaccattatctttgttttgatatctatatcagacagcatggtgcgtctgacaacacagggattaagacggaaagatgaaatgattctctcaacatcttcaatggataccttgctattttttctggcattatctatatgtgcgagaatatcctctagagaatcagtatcctttttgatgatagtggatctcaatgacatgggacgtctaaaccttcttattttatcaccagattgcatggtgatttgtcttctttcttttatcataatgtaatctctaaattcatcggcaaattgtctatatctaaaatcataatatgagatgtttacctctacaaatatctgttcgtccaatgttagagtatctacatcagttttgtattccaaattaaacatggcaacggatttaattttatattcctctattaagtcctcgtcgataataacagaatgtagataatcatttaatccatcgtacatggttggaagatgcttgttgacaaaatctttaattgtcttgatgaaggtgggactatatctaacatcttgattaataaaatttataacattgtccataggatactttgtaactagttttatacacatctcttcatcggtaagtttagacagaatatcgtgaacaggtggtatattatattcatcagatatacgaagaacaatgtccaaatctatattgtttaatatattatatagatgtagcgtagctcctacaggaatatctttaactaagtcaatgatttcatcaaccgttagatctattttaaagttaatcatataggcattgatttttaaaaggtatgtagccttgactacattctcattaattaaccattccaagtcactgtgtgtaagaagattatattctatcataagcttgactacatttggtcccgataccattaaagaattcttatgatataaggaaacagcttttaggtactcatctactctacaagaattttggagagccttaacgatatcagtgacgtttattatttcaggaggaaaaaacctaacattgagaatgtcggagttaatagcttccagatacagtgattttggcaatagtccgtgtaatccataatccagtaacacgagctggtgcttgctagacaccttttcaatgtttaatttttttgaaataagctttgataaagccttcctcgcaaattccggatacatgaacatgtcggcgacatgattaagtattgttttttcattatttttatattttctcaacaagttctcaataccccaatagatgatagaatatcacccaatgcgtccatgttgtctatttccaacaggtcgctatatccaccaatagaagtttttccaaaaaagattctaggaacagttctaccaccagtaatttgttcaaaatagtcacgcaattcattttcgggtttaaattctttaatatcgacaatttcatacgctcctcttttgaaactaaacttatttagaatatccagtgcatttctacaaaaaggacatgtatacttgacaaaaattgtcactttgttattggccaacctttgttgtacaaattcctcggccattttaatatttaagtgatataaaactatctcgacttatttaactctttagtcgagatatatggacgcagatagctatatgatagccaactacagaaggcaaacgctataaaaaacataattacgacgagcatatttataaatatttttattcagcattacttgatatagtaatattaggcacagtcaaacattcaaccactctcgatacattaactctctcattttctttaacaaattctgcaatatcttcgtaaaaagattcttgaaactttttagaatatctatcgactctagatgaaatagcgttcgtcaacatactatgttttgtatacataaaggcgcccattttaacagtttctagtgacaaaatgctagcgatcctaggatcctttagaatcacatagattgacgattcgtctctcttagtaactctagtaaaataatcatacaatctagtacgcgaaataatattatccttgacttgaggagatctaaacaatctagttttgagaacatcgataagttcatcgggaatgacatacatactatctttaatagaactcttttcatccagttgaatggattcgtccttaaccaactgattaatgagatcttctattttatcattttccagatgatatgtatgtccattaaagttaaattgtgtagcgcttctttttagtctagcagccaatactttaacatcactaatatcgatatacaaaggagatgatttatctatggtattaagaattcgtttttcgacatctgtcaaaaccaattcctttttgcctgtatcatccagttttccatcctttgtaaagaaattattttctactagactattaataagactgataaggattcctccataattgcacaatccaaactttttaacaaaactagactttacaagatctacaggaatgcgtacttcaggtttcttagcttgtgattttttcttttgtggacattttcttgtgaccaactcatctaccatttcattgattttagcagtgaaataagctttcaatgcacgggcactgatactattgaaaacgagttgatcttcaaattccgccatttaagttcaccaaacaacttttaaatacaaatatatcaatagtagtagaataagaactataaaaaaaataataattaaccaataccaaccccaacaaccggtattattagttgatgtgactgttttctcatcacttagaacagatttaacaatttctataaagtctgtcaaatcatcttccggagaccccataaatacaccaaatatagcggcgtacaacttatccatttatacattgaatattggcttttctttatcgctatcttcatcatattcatcatcaatatcaacaagtcccagattacgagccagatcttcttctacattttcagtcattgatacacgttcactatctccagagagtccgataacgttagccaccacttctctatcaatgattagtttcttgagtgcgaatgtaatttttgtttccgttccggatctatagaaaactacaggtgtgataattgccttggccaattgtctttctcttttactgagtgattctagttcaccttctatagatctgagaatggatgattctccagtcgaaacatattctaccatggatccgtttaatttgttgatgaagatggattcatccttaaatgttttctctgtaatagtttccaccgaaagactatgcaaagaatttggaatgcgttccttgtgcttaatgtttccatagacggcttctagaagttgatacaacataggactagccgcggtaacttttatttttagaaagtatccatcgcttctatcttgtttagatttatttttataaagtttagtctctccttccaacataataaaagtggaagtcatttgactagataaactatcagtaagttttatagagatagacgaacaattagcgtattgagaagcatttagtgtaacgtattcgatacattttgcattagatttactaatcgattttgcatactctataacacccgcacaagtctgtagagaatcgctagatgcagtaggtcttggtgaagtttcaactctcttcttgattaccttactcatgattaaacctaaataattgtactttgtaatataatgatatatattttcactttatctcatttgagaataaaaatgtttttgtttaaccactgcatgatgtacagatttcggaatcgcaaaccaccagtggttttattttatccttgtccaatgtgaattgaatgggagcggatgcgggtttcgtacgtagatagtacattcccgtttttagaccgagactccatccgtaaaaatgcatactcgttagtttggaataactcggatctgctatatggatattcatagattgactttgatcgatgaaggctcccctgtctgcagccatttttatgatcgtcttttgtggaatttcccaaatagttttataaactcgcttaatatcttctggaaggtttgtattctgaatggatccaccatctgccataatcctattcttgatctcatcattccataattttctctcggttaaaactctaaggagatgcggattaactacttgaaattctccagacaatactctccgagtgtaaatattactggtatacggttccaccgactcattatttcccaaaatttgagcagttgatgcagtcggcataggtgccaccaataaactatttctaagaccgtatgttctgattttatcttttagaggttcccaattccaaagatccgacggtacaacattccaaagatcatattgtagaataccgttactggcgtacgatcctacatatgtatcgtatggtccttccttctcagctagttcacaactcgcctctaatgcaccgtaataaatggtttcgaagatcttcttatttagatcttgtgcttccaggctatcaaatggataatttaagagaataaacgcgtccgctaatccttgaacaccaataccgataggtctatgtctcttattagagatttcagcttctggaataggataataattaatatctataattttattgagatttctgacaattactttgaccacatccttcagtttgagaaaatcaaatcgcccatctattacaaacatgttcaaggcaacagatgccagattacaaacggctacctcattagcatccgcatattgtattatctcagtgcaaagattactacacttgatagttcctaaattttgttgattactctttttgttacacgcatccttataaagaatgaatggagtaccagtttcaatctgagattctataatcgctttccagacgactcgagcctttattatagatttgtatctcctttctctttcgtatagtgtatacaatcgttcgaactcgtctccccaaacattgtccaatccaggacattcatccggacacatcaacgaccactctccgtcatccttcactcgtttcataaagagatcaggaatccaaagagctataaatagatctctggttctatgttcctcgtttcctgtattctttttaagatcgaggaacgccataatatcagaatgccacggttccaagtatatggccataactccaggccgtttgtttcctccctgatctatgtatctagcggtgttattataaactctcaacattggaataataccgtttgatataccattggtaccggagatatagcttccactggcacgaatattactaattgatagacctattccccctgccattttagagattaatgcgcatcgttttaacgtgtcatagataccctctatgctatcatcgatcatgttaagtagaaaacagctagacatttggtgacgactagttcccgcattaaataaggtaggagaagcgtgcgtaaaccatttttcagaaagtagattgtacgtctcaatagctgagtctatatcccattgatgaattcctactgcgacacgcattaacatgtgctgaggtctttcaacgatcttgttgtttattttcaacaagtaggatttttccaaagttttaaaaccaaaatagttgtatgaaaagtctcgttcgtaaataataaccgagttgagtttatccttatatttgttaactatatccatggtgatacttgaaataatcggagaatgtttcccatttttaggattaacatagttgaataaatcctccatcacttcactaaatagtttttttgtttccttgtgtagatttgatacggctattctggcggctagaatggcataatccggatgttgtgtagtacaagtggctgctatttcggctgccagagtgtccaattctaccgttgttactccattatatattccttgaataaccttcatagctattttaataggatctatatgatccgtgtttaagccataacataattttctaatacgagacgtgattttatcaaacatgacattttccttgtatccatttcgtttaatgacaaacatttttgttggtgtaataaaaaaattatttaacttttcattaatagggatttgacgtatgtagcgtacaaaattatcgttcctggtatatagataaagagtcctatatatttgaaaatcgttacggctcgattaaactttaatgattgcatagtgaatatatcattaggatttaactccttgactatcagggcggcaccagaaattaccatcaaaagcattaatacagttatgccgatcgcagttagaacggttatagcatccaccatttatatctaaaaattagatcaaagaatatgtgacaaagtcctagttgtatactgagaattgacgaaacaatgtttcttacatatttttttcttattagtaactgacttaatagtaggaactggaaagctagacttgattattctataagtatagatacccttccaaataatattctctttgataaaagttccagaaaatgtagaattttttaaaaagttatcttttgctattaccaagattgtgtttagacgcttattattaatatgagtgatgaaatccacaccgcctctagatatcgcttttatttccacattagatggtaaatccaatagtgaaactatctttttaggaatgtatggactcgcgtttagaggagtgaacgtcttaggcgtcggaaaggatgattcatcaaacgaataaacaatttcacaaatggatgttaatgtattagtaggaaattttttgacgctagtggaattgaagattctaatggatgatgttctacctatttcatccgataacatgttaatttccgacaccaacggttttaatatttcgatgatatacggtagtctctctttcggacttatatagcttattccacaatacgagtcattatatactccaaaaaacaaaataactagtataaaatctgtatcgaatgggaaaaacgaaattatcgacataggtatagaatctggaacattgaacgtattaatacttaattctttttctgtggtaagtaccgataggttattgacattgtatggttttaaatattctataacttgagacttgatagatattagtgatgaattgaaaattatttttatcaccacgtgtgtttcaggatcatcgtcgacgcccgtcaaccaaccgaatggagtaaaataaatatcattaatatatgctctagatattagtatttttatcaatcctttgattatcatcttctcgtaggcgaatgattccatgatcaagagtgatttaagaacatcctccggagtattaatgggcttagtaaacagtccatcgttgcaataataaaagttatccaagttaaaggatattatgcattcgtttaaagatatcacctcatctgacggagacaattttttggtaggttttagagactttgaagctacttgtttaacaaagttattcatcgtcgtttactattctatttaattttgtagttaatttatcacatatcacattaattgactttttggtccatttttccatacgtttatattcttttaatcctgcgttatccgtttccgttatatccagggatagatcttgcaagttaaatagaatgctcttaaataatgtcatttttttatccgctaaaaatttaaagaatgtataaacttttttcaaagatttaaaacttttaggtggagttctagtacacaatatcataaacaaactaataaacatcccgcattcagattccaacagctgattaacttccacattaatacagcctattttcgctccaaatgtacattcgaaaaatctgaataaaacatcgatgtcacaatttgtattatccaatacagaatgtctgtgattcgtgttaaaaccatcggagaaggaatagaaataaaaattattatagtggtggaattcagttggaatattgcctccggagtcataaaaggatactaaacattgttttttatcataaattacacatttccaatgagacaaataacaaaatccaaacattacaaatctagaggtagaacttttaattttgtctttaagtatatacgataagatatgtttattcataaacgcgtcaaatttttcatgaatcgctaaggagtttaagaatctcatgtcaaattgtcctatataatccacttcggatccataagcaaactgagagactaagttcttaatacttcgattgctcatccaggctcctctctcaggctctattttcatcttgacgacctttggattttcaccagtatgtattcctttacgtgataaatcatcgattttcaaatccatttgtgagaagtctatcgccttagatactttttcccgtagtcgaggtttaaagaaatacgctaacggtatactagtaggtaactcaaagacatcatatatagaatggtaacgcgtctttaactcgtcggttaactctttcttttgatcgagttcgtcgctactattgggtctgctcaggtgccccgactctactagttccaacatcataccgataggaatacaagacactttgccagcggttgtagatttatcatatttctccactacatatccgttacaatttgttaaaaatttagatacatctatattgctacataatccagctagtgaatatatatgacataataaattggtaaatcctagttctggtattttactaattactaaatctgtatatctttccatttatcatggaaaagaatttaccagatatcttcttttttccaaactgcgttaatgtattctcttacaaatattcacaagatgaattcagtaatatgagtaaaacggaacgtgatagtttctcattggcggtgtttccagttataaaacatagatggcataacgcacacgttgtaaaacataaaggaatatacaaagttagtacagaagcacgtggaaaaaaagtatctcctccatcactaggaaaacccgcacacataaacctaaccgcgaagcaatatatatacagtgaacacacaataagctttgaatgttatagttttctaaaatgtataacaaatacagaaatcaattcgttcgatgagtatatattaagaggactattagaagctggtaatagtttacagatattttccaattccgtaggtaaacgaacagatactataggtgtactagggaataagtatccatttagcaaaattccattggcctcattaactcctaaagcacaacgagagatattttcagcgtggatttctcatagacctgtagttttaactggaggaactggagtgggtaagacgtcacaggtacccaagttattgctttggtttaattatttatttggtggattctctactctagataaaatcactgactttcacgaaagaccagtcattctatctcttcctaggatagctttagttagattgcatagcaataccattttaaaatcattgggatttaaggtactagatggatctcctatttctttacggtacggatctataccggaagaattaataaacaaacaaccaaaaaaatatggaattgtattttctacccataagttatctctaacaaaactatttagttatggcactcttattatagacgaagttcatgagcatgatcaaataggagatattattatagcagtagcgagaaagcatcatacgaaaatagattctatgtttttaatgactgccacgttagaggatgacagggaacggctaaaagtatttttacctaatcccgcatttatacatattcctggagatacactgtttaaaattagcgaggtatttattcataataagataaatccatcttccagaatggcatacatagaagaagaaaagagaaatttagttactgctatacagatgtatactcctcctgatggatcatccggtatagtctttgtggcatccgttgcacagtgtcacgaatataaatcatatttagaaaaaagattaccgtatgatatgtatattattcatggtaaggtcttagatatagacgaaatattagaaaaagtgtattcatcacctaatgtatcgataattatttctactccttatttggaatccagcgttactatacacaatgttacacacatttatgatatgggtagagtttttgtccccgctccttttggaggatcgcaacaatttatttctaaatctatgagagatcaacgaaaaggaagagtaggaagagttaatcctggtacatacgtctatttctatgatctgtcttatatgaagtctatacagcgaatagattcagaatttctacataattatatattgtacgctaataagtttaatctaacactccccgaagatttgtttataatccctacaaatttggatattctatggcgtacaaaggaatatatagactcgttcgatattagtacagaaacatggaataaattattatccaattattatatgaagatgatagagtatgctaaactttatgtactaagtcctattctcgctgaggagttggataactttgagaggacgggagaattaactagtattgtacgagaagccattttatctctaaatttacgaattaagattttaaattttaaacataaagatgatgatacgtatatacacttttgtaaaatattattcggtgtctataacggaacaaacgctactatatattatcatagacctctaacgggatatatgaatatgatttcagatactatatttgttcctgtagataataactaaaaatcaaactctaatgaccacatctttttttagagatgaaaaattttctacatctccttttgtagacacgactaaacattttgcagaaaaaagtttattagtgtttagataatcgtatacttcatcagtgtagatagtaaatgtgaacagataaaaggtattcttgctcaatagattggtaaattccatagaatatattaatcctttcttcttgagatcccacatcatttcaaccagagacgttttatccaatgatttacctcgtactataccacatacaaaactagattttgcagtgacgtcgtacctggtattcctaccaaacaaaattttacttttagttcttttagaaaattctaaggtagaatctctatttgccaatatgtcatctatggaattaccactagcaaaaaatgatagaaatatatattgatacatcgcagctggttttgatctactatactttaaaaacgaatcagattccataattgcctgtatatcatcagctgaaaaactatgttttacacgtattccttcggcatttctttttaatgatatatcttgtttagacaatgataaagttatcatgtccatgagagacgcgtctccgtatcgtataaatatttcattagatgttagacgcttcattaggggtatacttctataaggtttcttaatcagtccatcattggttgcgtcaagaactactatcggatgttgttgggtatctctagtgttacacatggccttactaaagtttgggtaaataactatgatatctctattaattatagatgcatatatttcattcgtcaaggatattagtatcgacttgctatcgtcattaatacgtgtaatgtaatcatataaatcatgcgatagccaaggaaaatttaaatagatgttcatcatataatcgtcgctataattcatattaatacgttgacattgactaatttgtaatatagcctcgccacgaagaaagctctcgtattcagtttcatcgataaaggataccgttaaatataactggttgccgatagtctcatagtctattaagtggtaagtttcgtacaaatacagaatccctaaaatattatctaatgttggattaatctttaccataactgtataaaatggagacggagtcataactattttaccgtttgtacttactggaatagatgaaggaataatctccggacatgctggtaaagacccaaatgtctgtttgaagaaatccaatgttccaggtcctaatctcttaacaaaaattacgatattcgatcccgatatcctttgcattctatttaccagcatatcacgaactatattaagattatctatcatgtctattctcccaccgttatataaatcgcctccgctaagaaacgttagtatatccatacaatggaatacttcatttctaaaatagtattcgttttctaattctttaatgtgaaatcgtatactagaaagggaaaaattatctttgagttttccgttagaaaagaaccacgaaactaatgttctgattgcgtccgattccgttgctgaattaatggatttacaccaaaaactcatataacttctagatgtagaagcattcgctaaaaaattagtagaatcaaaggatataagtagatgttccaacaagtgagcaattcccaagatttcatctatatcattctcgaatccgaaattagaaattcccaagtagatatcctttttcatccgatcgttgatgaaaatacgaactttattcggtaagacaatcatttactaaggagtaaaataggaagtaatgttcgtatgtcgttatcatcgtataaattaaaggtgtgttttttaccattaagtgacattataattttaccaatattggaattataatataggtgtatttgcgcactcgcgacggttgatgcatcggtaaatatagctgtatctaatgttctagtcggtatttcatcatttcgctgtctaataatagcgttttctctatctgtttccattacagctgcctgaagtttattggtcggataatatgtaaaataataagaaatacatacgaataacaaaaataaaataagatataataaagatgccatttagagatctaattttgttcaacttgtccaaattcctacttacagaagatgaggaatcgttggagatagtgtcttccttatgtagaggatttgaaatatcttatgatgacttgataacttactttccagataggaaataccataaatatatttataaagtatttgaacatgtagatttatcggaggaattaagtatggaattccatgatacaactttgcgagatttagtttatcttagattgtacaagtattccaagtgtatacggccgtgttataaattaggagataatctaaaaggcatagttgttataaaggacaggaatatttatattagggaagcaaatgatgacttgatagaatatctcctcaaggaatacactcctcagatttatacatattctaatgagcgcgtccccataactggttcaaaattaattctttgtggattttctcaagttacatttatggcgtatacaacgtcgcatataacaacaaataaaaaggtagatgttctcgtttccaaaaaatgtatagatgaactagtcgatccaataaattatcaaatacttcaaaatttatttgataaaggaagcggaacaataaacaaaatactcaggaagatattttattcggtaaccggtggccaaactccataggtagctttttctatttcggattttagaatttccaaattcaccagcgatttatcggttttggtgaaatccaaggatttattaatgtccacaaatgccatttgttttgtctgtggattgtatttgaaaatggaaacgatgtagttagatagatgcgctgcgaagtttcctattagggttccgcgcttcacgtcacccagcatacttgaatcaccatcctttaaaaaaaatgataagatatcaacatggagtatatcatactcggattttaattcttctactgcatcactgacattttcacaaatactacaatacggtttaccgaaaataatcagtacgttcttcatttatgggtatcaaaaacttaaaatcgttactgctggaaaataaatcactgacgatattagatgataatttatacaaagtatacaatggaatatttgtggatacaatgagtatttatatagccgtcgccaattgtgtcagaaacttagaagagttaactacggtattcataaaatacgtaaacggatgggtaaaaaagggagggcatgtaaccctttttatcgatagaggaagtataaaaattaaacaagacgttagagacaagagacgtaaatattctaaattaaccaaggacagaaaaatgctagaattagaaaagtgtacatccgaaatacaaaatgttaccggatttatggaagaagaaataaaggcaaaaatgcaattaaaaatcgataaacttacatttcaaatatatttatctgattctgataacataaaaatatcattgaatgagatactaacacatttcaacaataatgagaatgttacattattttattgtgatgaacgagacgcagaattcgttatgtgtctcgaggctaaaacacatttctctaccacaggagaatggccgttgataataagtaccgatcaggatactatgctatttgcatctactgataatcatcctaagatgataaaaaacttaactcaactgtttaaatttgttccctcggcagaggataactatttagcaaaattaacggcgttagtgaatggatgtgatttctttcctggactctatggggcatctataacacccaccaacttaaacaaaatacaattgtttagtgattttacaatcgataatatagtcactagtttggcaattaaaaattattatagaaagactaactctaccgtagacgtgcgtaatattgttacgtttataaacgattacgctaatttagacgatgtctactcgtatgttcctccttgtcaatgcactgttcaagaatttatattttccgcattagatgaaaaatggaatgaatttaaatcatcttatttagagaccgttccgttaccctgtcaattaatgtacgcgttagaaccacgtaaggagattgatgtttcagaagttaaaactttatcatcttatatagatttcgaaaatactaaatcagatatcgatgttataaaatctatatcctcgatttttggatattctaacgaaaactgtaacacgatagtattcggcatctataaggataatttactactgagtataaataattcattttactttaacgatagtctgttaataaccaatactaaaagtgataatataataaatataggttactagattaaaaatggtgttccaactcgtgtgctctacatgcggtaaagatatttctcacgaacgatataaattgattatacgaaaaaaatcattaaaggatgtactcgtcagtgtaaagaacgaatgttgtaggttaaaattatctacacaaatagaacctcaacgtaacttaacagtgcaacctctattggatataaactaatatggatccggttaattttatcaagacatatgcgcctagaggttctattatttttattaattataccatgtcattaacaagtcatttgaatccatcgatagaaaaacatgtgggtatttattatggtacgttattatcggaacacttggtagttgaatctacctatagaaaaggagttcgaatagtcccattggatagtttttttgaaggatatcttagtgcaaaagtatacatgttagagaatattcaagttatgaaaatagcagctgatacgtcattaactttattgggtattccgtatggatttggtcatgatagaatgtattgttttaaattggtagctgactgttataaaaatgccggtgttgaaacatcgtctaaacgaatattaggtaaagatatttttctgagccaaaacttcacagacgataatagatggataaagatatatgattctaataatttaacattttggcaaattgattaccttaaagggtgagttaatatgcataactactcctccgttgttttttccctcgttctttttcttaacgttgtttgccatcactctcataatgtaaagatattctaaaatggtaaacttttgcatatcggacgcagaaattggtataaatgttgtaattgtattatttcccgtcaatggactagtcacagctccatcagttttatatcctttagagtatttctcactcgtgtctaacattctagagcattccatgatctgtttatcgttgatattggccggaaagatagattttttattttttattatattactattggcaattgtagatataacttctggtaaatatttttctaccttttcaatctcttctattttcaagccggctatatattctgctatattgttgctagtatcaataccttttcttgctaagaagtcatatgtggtattcactatatcagttttaactggtagttccattagcctttccacttctgcagaataatcagaaattggttctttaccagaaaatccagctactataataggctcaccgatgatcattggcaaaatcctatattgtaccagattaatgagagcatatttcatttccaataattctgctagttcttgagacattgatttatttgatgaatctagttggttctctagatactctaccatttctgccgcatacaataacttgttagataaaatcagggttatcaaagtgtttagcgtggctagaatagtgggcttgcatgtattaaagaatgcggtagtatgagtaaaccgttttaacgaattatatagtctccagaaatctgtggcgttacatacatgagccgaatgacatcgaagattgtccaatatttttaatagctgctctttgtccattatttctatatttgactcgcaacaattgtagataccattaatcactgattcctttttcgatgccggacaatagcacaattgtttagctttggactctatgtattcagaattaatagatatatctcttaatacagattgcactatacattttgaaactatgtcaaaaattgtagaacgacgctgttctgcagccatttaactttaaataatttacaaaaatttaaaatgagcatccgtataaaaatcgataaactgcgccaaattgtggcatatttttcagagttcagtgaagaagtgtctataaatgtagactcgacggatgagttaatgtatatttttgccgccttgggcggatctgtaaacatttgggccattatacctctcagtgcatcagtgttctaccgcggagccgaaaatattgtgtttaatcttccggtgtccaaggtaaaatcgtgtttgtgtagttttcacaatgatgccatcatagatatagaacctgatctggaaaataatctagtaaaactttctagttatcatgtagtaagtgtcgattgtaacaaggaactgatgcctattaggacagatactactatttgtctaagtatagatcaaaagaaatcttacgtgtttaattttcacaagtatgaagaaaaatgttgtggtagaaccgtcattcatttagaatggttgttgggctttatcaagtgtattagtcagcatcagcatttggctattatgtttaaagatgacaatattattatgaagactcctggtaatactgatgcgttttccagggaatattctatgactgaatgttctcaagaactacaaaagttttctttcaaaatagctatctcgtctctcaacaaactacgaggattcaaaaagagagtcaatgtttttgaaactagaatcgtaatggataatgacgataacattctaggaatgttgttttcggatagagttcaatcctttaagatcaacatctttatggcgtttttagattaatactttcaatgagataaatatgggtggcggagtaagtgttgagctccctaaacgggatccgcctccgggagtacccactgatgagatgttattaaacgtggataaaatgcatgacgtgatagctcccgctaagcttttagaatatgtgcatataggaccactagcaaaagataaagaggataaagtaaagaaaagatatccagagtttagattagtcaacacaggacccggtggtctttcggcattgttaagacaatcgtataatggaaccgcacccaattgctgtcgcacttttaatcgtactcattattggaagaaggatggaaagatatcagataagtatgaagagggtgcagtattagaatcgtgttggccagacgttcacgacactggaaaatgcgatgttgatttattcgactggtgtcagggggatacgttcgatagaaacatatgccatcagtggatcggttcagcctttaataggagtgatagaactgtagagggtcaacaatcgttaataaatctgtataataagatgcaaacattatgtagtaaagatgctagtgtaccaatatgtgaatcatttttgcatcatttacgcgcacacaatacagaagatagcaaagagatgatcgattatattctaagacaacagtctgcggactttaaacagaaatatatgagatgtagttatcccactagagataagttagaagagtcattaaaatatgcggaacctcgagaatgttgggatccagagtgttcgaatgccaatgttaatttcttactaacacgtaattataataatttaggactttgcaatattgtacgatgtaatactagcgtgaacaacttacagatggataaaacttcctcattaagattgtcatgtggattaagcaatagtgatagattttctactgttcccgtcaatagagcaaaagtagttcaacataatattaaacattcgttcgacctaaaattgcatttgatcagtttattatctctcttggtaatatggatactaattgtagctatttaaatgggtgccgcggcaagcatacagacgacggtgaatacactcagcgaacgtatctcgtctaaattagaacaagaagcgaacgctagtgctcaaacaaaatgtgatatagaaatcggaaatttttatatccgacaaaaccatggatgtaacctcactgttaaaaatatgtgctctgcggacgcggatgctcagttggatgctgtgttatcagccgctacagaaacatatagtggattaacaccggaacaaaaagcatacgtgccagctatgtttactgctgcgttaaacattcagacaagtgtaaacactgttgttagagattttgaaaattatgtgaaacagacttgtaattctagcgcggtcgtcgataacaaattaaagatacaaaacgtaatcatagatgaatgttacggagccccaggatctccaacaaatttggaatttattaatacaggatctagcaaaggaaattgtgccattaaagcgttgatgcaattgacgactaaggccactactcaaatagcacctagacaagttgctggtacaggagttcagttttatatgattgttatcggtgttataatattggcagcgttgtttatgtactatgccaagcgtatgctgttcacatccaccaatgataaaatcaaacttattttagccaataaggaaaacgtccattggactacttacatggacacattctttagaacttctccgatggttattgctaccacggatatacaaaactgaaaatatattgataatattttaatagattaacatggaagttatcgctgatcgtctagacgatatagtgaaacaaaatatagcggatgaaaaatttgtagattttgttatacacggtctagagcatcaatgtcctgctatacttcgaccattaattaggttgtttattgatatactattatttgttatagtaatttatatttttacggtacgtctagtaagtagaaattatcaaatgttgttggtggcgctagtcatcacattaactattttttattactttatactataatagtactagactgacttctaacaaacatctcacctgccataaataaatgcttgatattaaagtcttctatttctaacactattccatctgtggaaaataatactctgacattatcgctaattgacacatcggtgagtgatatgcctataaagtaataatcttctttgggcacatataccagtgtaccaggttctaacaacctatttactggtgctcctgtagcatactttttctttaccttgagaatatccatcgtttgcttggtcaatagcgatatgtgattttttatcaaccactcgaaaaagtaattggagtgttcatatcctctacgggctattgtctcatggccgtgtatgaaatttaagtaacacgactgtggtagatttgttctatagagccggttgccgcaaatagatagaactaccaatatgtctgtacaaatgttaaacattaattgattaacagaaaaaacaatgttcgttctgggaatagaaaccagatcaaaacaaaattcgttagaatatatgccacgtttatacattgaatataaaataactacagtttgaaaaataacagtatcatttaaacatttaacttgcggggttaatctcacaactttactgtttttaaactgttcaaaatatagcatcgatccatgagaaatacgtttagccgcctttaatagaggaaatcccaccgcctttctggatctcaccaacgacgatagttctgaccagcaactcatttcttcatcatccacctgttttaacatataataggcaggagatagatatccgtcattgcaatattccttctcgtaggcacacaatctaatattgataaaatctccattctcttctctgcatttattatcttgtttcggtggctgattaggctgtagtcttggtttaggctttggtatatcgttgttgaatctattttggtcattaaatctttcatttcttcctggtatatttttatcacctcgtttggttggatttttgtctatattatcgtttgtaacatcggtacgggtattcatttatcacaaaaaaaacttctctaaatgagtctactgctagaaaacctcatcgaagaagataccatattttttgcaggaagtatatctgagtatgatgatttacaaatggttattgccggcgcaaaatccaaatttccaagatctatgctttctatttttaatatagtacctagaacgatgtcaaaatatgagttggagttgattcataacgaaaatatcacaggagcaatgtttaccacaatgtataatataagaaacaatttgggtctaggagatgataaactaactattgaagccattgaaaactatttcttggatcctaacaatgaagttatgcctcttattattaataatacggatatgactgccgtcattcctaaaaaaagtggtaggagaaagaataagaacatggttattttccgtcaaggatcatcacctatcttgtgtattttcgaaactcgtaaaaagattaatatttataaagaaaatatggaatccgcatcgactgagtatacacctatcggagacaacaaggctttgatatctaaatatgcgggaattaatatcctaaatgtgtattctccttccacatccataagattgaatgccatttacggattcaccaataaaaataaactagagaaacttagtactaataaggaactagaatcgtatagttctagccctcttcaagaacccattaggttaaatgattttctgggactattggaatgtgttaaaaagaatattcctctaacagatattccgacaaaggattgattactataaatggagaatgttcctaatgtatactttaatcctgtgtttatagagcccacgtttaaacattctttattaagtgtttataaacacagattaatagttttatttgaagtattcgttgtattcattctaatatatgtattttttagatctgaattaaatatgttcttcatgcctaaacgaaaaatacccgatcctattgatagattacgacgtgctaatctagcgtgtgaagacgataaattaatgatctatggattaccatggatgacaactcaaacatctgcgttatcaataaatagtaaaccgatagtgtataaagattgtgcaaagcttttgcgatcaataaatggatcacaaccagtatctcttaacgatgttcttcgcagatgatgattcattttttaagtatttggctagtcaagatgatgaatcttcattatctgatatattgcaaatcactcaatatctagactttctgttattattattgatccaatcaaaaaataaattagaagccgtgggtcattgttatgaatctctttcagaggaatacagacaattgacaaaattcacagactttcaagattttaaaaaactgtttaacaaggtccctattgttacagatggaagggtcaaacttaataaaggatatttgttcgactttgtgattagtttgatgcgattcaaaaaagaatcctctctagctaccaccgcaatagatcctattagatacatagatcctcgtcgcgatatcgcattttctaacgtgatggatatattaaagtcgaataaagtgaacaataattaattctttattgtcatcatgaacggcggacatattcagttgataatcggccccatgttttcaggtaaaagtacagaattaattagacgagttggtaccaaaaattgaaaaactagcgtctttttttgctcgactgcagaccatgggaactcctaaaccgcggattctgccatggctggtgagtcagttggacctcggtcaattggagggtgtcgcgtgggtaaacaagagcaggactcgattccgcataccatggaaacacggactcaggcaagacgcacaacaagaggattttgggatctttcaggcgtgggccgaagcaaccggcgcctacgtcccaggaagagacaaacccgatttgccgacttggaagaggaacttcaggagtgctttgaaccgcaaggaggggcttaggctcgcggaggatagatccaaggacccacacgatccacacaaaatatacgaattcgtcaattccggtgtgggcgacttttcccaaccagacacctcccctgacactaacggcggtggaagtacgagtgatacccaggaggatatcttggacgaacttctcggtaatatggttctggcaccccttccagatcctggtccacctagtcttgcggtagcaccggagccctgcccccagccgcttagatccccctccctcgacaaccctacaccctttcccaacctcggtcctagcgagaacccgcttaaaaggttgctcgtgcccggtgaagaatgggagttcgaagtgacggcattttatcgcgggcgacaggtattccaacagactattagttgcccggaaggtcttagacttgtcgggagcgaggtgggggatcgcacccttcctggctggccagttacactccctgacccaggaatgtcattgactgacagaggcgttatgtcttatgtgcgccacgtattgtcttgcctcggaggcggcctggcgctctggagagcgggacagtggctttgggcacaaagactcgggcattgtcatacctattgggcagtgtccgaagaattgctgccgaatagcggacacgggccagacggtgaagtccctaaggacaaagaaggcggcgttttcgatttgggtccatttattgttgacctgatcactttcactgaggggtccggaaggagtcctcgctacgcgttgtggttttgtgtcggggaaagctggccccaggaccagccgtggacaaaacgactcgtgatggtcaaggttgttcctacttgccttcgggccttggtcgaaatggccagagtgggaggtgcatccagccttgagaacacagtcgatcttcacatttccaactctcaccccctgagtcttacgtctgaccaatataaagcgtatcttcaggacctcgtcgaagggatggacttccaaggacccggagagagttgattaattaatttttatgagctcggaggtaatgatatgtatcaatcggtgtgtagaaagtgttacatcgactcataatattatattttttatctaaaaaactaaaaataaacattgattaaattttaatataatacttaaaaatggatgttgtgtcgttagataaaccgtttatgtattttgaggaaattgataatgagttagattacgaaccagaaagtgcaaatgaggtcgcaaaaaaactaccgtatcaaggacagttaaaactattactaggagaattattttttcttagtaagttacagcgacacggtatattagatggtgccaccgtagtgtatataggatcggctcctggtacacatatacgttatttgagagatcatttctataatttaggagtgatcatcaaatggatgctaattgacggccgccatcatgatcctattttaaatggattgcgtgatgtgactctagtgactcggttcgttgatgaggaatatctacgatccatcaaaaaacaactgcatccttctaagattattttaatttctgatgtaagatccaaacgaggaggaaatgaacctagtacggcggatttactaagtaattacgctctacaaaatgtcatgattagtattttaaaccccgtggcatctagtcttaaatggagatgcccgtttccagatcaatggatcaaggacttttatatcccacacggtaataaaatgttacaaccttttgctccttcatattcagctgaaatgagattattaagtatttataccggtgagaacatgagactgactcgagttaccaaattagacgctgtaaattatgaaaaaaagatgtactaccttaataagatcgtccgtaacaaagtagttgttaactttgattatcctaatcaggaatatgactattttcacatgtactttatgctgaggaccgtgtactgcaataaaacatttcctactactaaagcaaaggtactatttctacaacaatctatatttcgtttcttaaatattccaacaacatcaactgaaaaagttagtcatgaaccaatacaacgtaaaatatctagcaaaaattctatgtctaaaaacagaaatagcaagagatccgtacgcggtaataaatagaaacgtgctactgagatatactaccgatatagagtataatgatttagttactttaataaccgttagacataaaattgattctatgaaaactgtgtttcaggtatttaacgaatcatccataaattatactccggttgatgatgattatggagaaccaatcattataacatcgtatcttcaaaaaggtcataacaagtttcctgtaaattttctatacatagatgtggtaatatctgacttatttcctagctttgttagactagatactacagaaactaatatagttaatagtgtactacaaacaggcgatggtaaaaagactcttcgtcttcccaaaatgttagagacggaaatagttgtcaagattctctatcgccctaatataccattaaaaattgttagatttttccgcaataacatggtaactggagtagagatagccgatagatctgttatttcagtcgctgattaatcaattagtagagatgagataagaacattataataatcaataatattatcttatatctcgtttagaaaaatgctaatattaaaatagctaacgctagtaatccaatcggaagccatttgatatctataatagggtatctaatttcctgattcagatagcggacagctatattctcggtagctactcgtttggaatcacaaacattatttacatctaatttactatctgtaatggaaacgtttcccaatgaaatggtacaatccgatacattgcattttgttatatttttttttaaagaggctggtaacaacgcatcgcttcgtttacatggctcgtaccaacaataatagggtaatcttgtatctattcctatccgtactatgcttttatcaggataaatacatttacatcgtatatcgtctttgttagcatcacagaatgcataaatttgttcgtccgtcatgataaaaatttaaagtgtaaatataactattatttttatagttgtaataaaaagggaaatttgattgtatactttcggttctttaaaagaaactgacttgataaaaatggctgtaatctctaaggttacgtatagtctatatgatcaaaaagagattaatgctacagatattatcattagtcatgttaaaaatgacgacgatatcggtaccgttaaagatggtagactaggtgctatggatggggcattatgtaaaacttgtgggaaaacggaattggaatgtttcggtcactggggtaaagtaagtatttataaaactcatatagttaagcctgaatttatttcagaaattattcgtttactgaatcatatatgtattcactgcggattattgcgttcacgagaaccgtattccgacgatattaacctaaaagagttatcgggacacgctcttaggagattaaaggataaaatattatccaagaaaaagtcatgttggaacagcgaatgtatgcaaccgtatcaaaaaattactttttcaaagaaaaaggtttgtttcgtcaacaagttggatgatattaacgttcctaattctctcatctatcaaaagttaatttctattcatgaaaagttttggccattattagaaattcatcaatatccagctaacttattttatacagactactttcccatccctccgctgattattagaccggctattagtttttggatagatagtatacccaaagagaccaatgaattaacttacttattaggtatgatcgttaagaattgtaacttgaatgctgatgaacaggttatccagaaggcggtaatagaatacgatgatattaaaattatttctaataacactaccagtatcaatttatcatatattacatccggcaaaaataatatgattagaagttatatcgtcgcccgacgaaaagatcagaccgctagatctgtaattggtcccagtacatctatcaccgttaatgaggtaggaatgcccgcatatattagaaatacacttacagaaaagatatttgttaatgcctttacagtggataaagttaaacaactattagcgtcaaaccaagttaaattttactttaataaacgattaaaccaattaacaagaatacgccaaggaaagtttatcaaaaataaaatacatttattgcctggtgattgggtagaagtagctgttcaagaatatacaagtattatttttggaagacagccgtctctacatagatacaacgtcatcgcttcatctatcagagctaccgaaggagatactatcaaaatatctcccggaattgccaactctcaaaatgctgatttcgacggagatgaagaatggatgatattggagcaaaatcctaaagccgtaattgaacaaagtattcttatgtatccgacgacgttactcaaacacgatattcatggagcccccgtttatggatctattcaagatgaaatcgtagcagcgtattcattgtttaggatacaagatctttgtttagatgaagtattgaacatcttggggaaatatggaagagagttcgatcctaaaggtaaatgtaaattcagcggtaaagatatctatacttacttgataggtgaaaagattaattatccgggtctcttaaaggatggtgaaattattgcaaacgacgtagatagtaattttgttgtggctatgaggcatctgtcattggctggactcttatccgatcataagtcgaacgtggaaggtatcaactttattatcaagtcatcttatgtttttaagagatatctatctatttacggttttggggtgacattcaaagatctgagaccaaattcgacgttcactaataaattggaggccatcaacgtagaaaaaatagaacttatcaaagaagcatacgccaaatatctcaacgatgtaagagacgggaaaatagttccattatctaaagctttagaggcggactatgtggaatccatgttatccaacttgacaaatcttaatatccgagagatagaagaacatatgagacaaacgctgatagatgatccagataataacctcctgaaaatggccaaagcgggttataaagtaaatcctacagaactaatgtatattctaggtacgtatggacaacaaaggattgatggtgaaccagcagagactcgagtattgggtagagtcttaccttactatcttccagactctaaggatccagaaggaagaggttacattcttaattctttaacaaaaggattaacgggttctcaatattacttttcgatgctggttgccagatctcaatctactgatatcgtctgtgaaacatcacgtaccggaacactggctagaaaaatcattaaaaagatggaggatatggtggtcgacggatacggacaagtagttataggtaatacgctcatcaagtacgccgccaattataccaaaattctaggctcagtatgtaaacctgtagatcttatctatccagatgagtccatgacttggtatttggaaattagtgctctgtggaataaaataaaacagggattcgtttactctcagaaacagaaacttgcaaagaagacattggcgccgtttaatttcctagtattcgtcaaacccaccactgaggataatgctattaaggttaaggatctgtacgatatgattcataacgtcattgatgatgtgagagagaaatacttctttacggtatctaatatagattttatggagtatatattcttgacgcatcttaatccttctagaattagaattacaaaagaaacggctatcactatctttgaaaagttctatgaaaaactcaattatactctaggtggtggaactcctattggaattatttctgcacaggtattgtctgagaagtttacacaacaagccctgtccagttttcacactactgaaaaaagtggtgccgtcaaacaaaaacttggtttcaacgagtttaataacttgactaatttgagtaagaataagaccgaaattatcactctggtatccgatgatatctctaaacttcaatctgttaagattaatttcgaatttgtatgtttgggagaattaaatccagacatcactcttcgaaaagaaacagataaatatgtagtagatataatagttaatagattatacatcaagagagcagaaataaccgaattagttgtcgaatatatgattgaacgatttatctcctttagcgtcattgtaaaggaatggggtatggagacattcattgaggacgaggataatattagatttactgtctacctaaatttcgttgaaccggaagaattgaatcttagtaagtttatgatggttcttccgggtgccgccaacaagggcaagattagtaaattcaagattcctatctctgattatacgggttatgacgacttcaatcaaacaaaaaagctcaataagatgactgtagaactcatgaatctaaaagaattgggttctttcgatttggaaaacgtcaacgtgtatcctggagtatggaatacatacgatatcttcggtatcgaggccgctcgtgaatacttgtgcgaagccatgttaaacacctatggagaagggttcgattatctgtatcagccttgtgatcttctcgctagtttactatgtgctagttacgaaccagaatcagttaataaattcaagttcggtgcagctagtactcttaagagagctacgttcggagacaataaagcattgttaaacgcggctcttcataaaaagtcagaacctattaacgataatagtagctgccacttttttagcaaggtccctaatataggaactggatattacaaatactttatcgacttgggtcttctcatgagaatggaaaggaaactatctgataagatatcttctcaaaagatcaaggaaatggaagaaacagaagacttttaattcttatcaataacatatttttctatgatctgtcttttaaacgatggattttccacaaatgcgcctctcaagtccctcatagaatgatacacgtataaaaaatatagcataggcaatgactccttatttttagacattagatatgccaaaatcatagccccgcttctatttactcccgcagcacaatgaaccaacacgggctcgtttcgttgatcacatttagataaaaaggcggttacgtcgtcaaaatatttactaatatcggtagttgtatcatctaccaacggtatatgaataatattaatattagagttaggtaatgtatatttatccatcgtcaaatttaaaacatatttgaacttaacttcagatgatggtgcatccatagcatttttataatttcccaaatacacattattggttacccttgtcattatagtgggagatttggctttgtgcatatctccagttgaacgtagtagtaagtatttatacaaacttttcttatccatttataacgtacaaatggataaaactactttatcggtaaacgcgtgtaatttagaatacgttagagaaaaggctatagtaggcgtacaagcagccaaaacatcaacacttatattctttgttattatattggcaattagtgcgctattactctggtttcagacgtctgataatccagtctttaatgaattaacgagatatatgcgaattaaaaatacggttaacgattggaaatcattaacggatagcaaaacaaaattagaaagtgatagaggtagacttctagccgctggtaaggatgatatattcgacttcaaatgtgtggatttcggcgcctattttatagctatgcgattggataagaaaacatatctgccgcaagctattaggcgaggtactggagacgcgtggatggttaaaaaggcggcaaaggtcgatccatctgctcaacaattttgtcagtatttgataaaacacaagtctaataatgttattacttgtggtaatgagatgttaaatgaattaggttatagcggttattttatgtcaccgcattggtgttccgattttagtaatatggaatagtgttagataaatgcggtaacgaatgttcctgtaaggaaccataacagtttagatttaacgttaaagatgagcataaacataataaacaaaattacaatcaaacctataacattaatatcaaacaatccaaaaaatgaaatcagtggagtagtaaacgcgtacataactcctggataacgtttagcagctgccgttcctattctagaccaaaaattcggtttcatgttttcgaagcggtgttctgcaacaagtcggggatcgtgttctacatatttggcggcgttatccagtatctgcctattgatcttcatttcgttttcgattctggctatttcaaaataaaatcccgatgatagacctccagactttataatttcatctacgatgttcagcgccgtagtaactctaataatataggctgataagctaacatcataccctcctgtatatgtgaatatggcatgatttttgtccattacaagctcggttttaactttattgcctgtaataatttctctcatctgtaggatatctatttttttgtcatgcattgccttcaagacgggacgaagaaacgtaatatcctcaataacgttatcgttttctacaataactacatattctacctttttattttctaactcggtaaaaaaattagaatcccatagggctaaatgtctagcgatatttcttttcgtttcctctgtacacatagtgttacaaaaccctgaaaagaagtgagtatacttgtcatcatttctaatgtttcctccagtccactgtataaacgcataatccttgtaatgatctggatcatccttgactaccacaacatttcttttttctggcataacttcgttgtcctttacatcatcgaacttctgatcattaatatgctcatgaacattaggaaatgtttctgatggaggtctatcaataactggcacaacaataacaggagttttcaccgccgccatttagttattgaaattaatcatatacaactctttaatacgagttatattttcgtctatccattgtttcacatttacatatttcgacaaaaagatataaaatgcgtattccaatgcttctctgtttaatgaattactaaaatatacaaacacgtcactgtctggcaataaatgatatcttagaatattgtaacaatttattttgtattgcacatgttcgtgatctatgagttcttcttcgaatggcataggatctccgaatctgaaaacgtataaataggagttagaataataatatttgagagtattggtaatatataaactctttagcggtataattagtttttttctctcaatttctatttttagatgtgatggaaaaatgactaattttgtagcattagtatcatgaactctaatcaaaatcttaatatcttcgtcacacgttagctctttgaagtttttaagagatgcatcagttggttctacagatggagtaggtgcaacaattttttgttctacacatgtatgtactggagccattgttttaactataatggtgcttgtatcgaaaaactttaatgcagatagcggaagctcttcgccgcgactttctacatcgtaattgggttctaacgccgatctctgaatggatactagttttctaagttctaatgtgattctctgaaaatgtaaatccaattcctccggcattatagatgtgtatacatcggtaaataaaactatagtatccaacgatcccttctcgcaaattctagtcttaaccaaaaaatcgtatataaccacggagatggcgtatttaagagtggattcttctaccgttttgttcttggatgtcatataggaaactataaagtccgcactactgttaagaatgattactaacgcaactatatagttcaaattaagcattttggaaacataaaataactctgtagacgatacttgactttcgaataagtttgcagacaaacgaagaaagaacagacctctcttaatttcagaagaaaactttttttcgtattcctgacgtctagagtttatatcaataagaaagttaagaattagtcggttaatgttgtatttcattacccaagtttgagatttcataatattatcaaaagacatgataatattaaagataaagcgctgactatgaacgaaatagctatatggttcgctcaagaatatagtcttgttaaacgtggaaacgataactgtatttttaatcacgtcagcggcatctaaattaaatataggtatatttattccacacactctacaatatgccacaccatcttcataataaataaattcgttagcaaaattattaattttagtgaaatagttagcgtcaactttcatagcttccttcaatctaatttgatgctcacacggtgcgaattccactctaacatcccttttccatgcctcaggttcatcgatctctataatatctagtttcttgcgtttcacaaacacgggctcgtctctcgcgatgagatctgtatagtaactatgtaaatgataactagatagaaagatgtagctatatagatgacgatcctttaagagaggtataataactttaccccaatcagataaactattgttatggtcttcggaaaaagaatttttataaatttttccagtattttccaaatatacgtacttgacatctaaaaaatccttaatgataataggaatggataatccgtctattttataaagaaatacatatcgcacattatacttttttttggaaatgggaataccgatgtgtctacataaatatgcaaagtctaaatattttttagagaatcttagttggtccaaattcttttccaagtacggtaatagatttttcatattgaacggtatcttcttaatctctggttctagttccgcattaaatgatgaaactaagtcactatttttataactaacgattacatcacctctaacatcatcatttaccagaatactgatcttcttttgtcgtaaatacatgtctaatgtgttaaaaaaaagatcatacaagttatacgtcatttcatctgtggtattcttgtcattgaaggataaactcgtactaatctcttctttaacagcctgttcaaatttatatcctatatacgaaaaaatagcaaccagtgtttgatcatccgcgtcaatattctgttctatcgtagtgtataacaatcgtatatcttcttctgtgatagtcgatacgttataaaggttgataacgaaaatatttttatttcgtgaaataaagtcatcgtaggattttggacttatattcgcgtctagtagatatgcttttatttttggaatgatctcaattagaatagtctctttagagtccatttaaagttacaaacaactaggaaattggtttatgatgtataatttttttagtttttatagattctttattctatacttaaaaaatgaaaataaatacaaaggttcttgagggttgtgttaaattgaaagcgagaaataatcataaattatttcattatcgcgatatccgttaagtttgtatcgtaatggcgtggtcaattacaaataaagcggatactagtagcttcacaaagatggctgaaatcagagctcatctaaaaaatagcgctgaaaataaagataaaaacgaggatattttcccggaagatgtaataattccatctactaagcccaaaaccaaacgagccactactcctcgtaaaccagcggctactaaaagatcaaccaaaaaggaggaagtggaagaagaagtagttatagaggaatatcatcaaacaactgaaaaaaattctccatctcctggagtcagcgacattgtagaaagcgtggccgctgtagagctcgatgatagcgacggggatgatgaacctatggtacaagttgaagctggtaaagtaaatcatagtgctagaagcgatctttctgacctaaaggtggctaccgacaatatcgttaaagatcttaagaaaattattactagaatctctgcagtatcgacggttctagaggatgttcaagcagctggtatctctagacaatttacttctatgactaaagctattacaacactatctgatctagtcaccgagggaaaatctaaagttgttcgtaaaaaagttaaaacttgtaagaagtaaatgcgtgcacttttttataaagatggtaaactctttaccgataataattttttaaatcctgtatcagacgataatccagcgtatgaggttttgcaacatgttaaaattcctactcatttaacagatgtagtagtatatgaacaaacgtgggaggaggcgttaactagattaatttttgtgggaagcgattcaaaaggacgtagacaatacttttacggaaaaatgcatgtacagaatcgcaacgctaaaagagatcgtatttttgttagagtatataacgttatgaaacgaattaattgttttataaacaaaaatataaagaaatcgtccacagattccaattatcagttggcggtttttatgttaatggaaactatgttttttattagatttggtaaaatgaaatatcttaaggagaatgaaacagtagggttattaacactaaaaaataaacacatagaaataagtcccgatgaaatagttatcaagtttgtaggaaaggacaaagtttcacatgaatttgttgttcataagtctaatagactatataagccgctattgaaactgacggatgattctagtcccgaagaatttctgttcaacaaactaagtgaacgaaaggtatacgaatgtatcaaacagtttggtattagaatcaaggatctccgaacgtatggagtcaattatacgtttttatataatttttggacaaatgtaaagtccatatctcctcttccatcaccaaaaaagttaatagcgttaactatcaaacaaactgctgaagtggtaggtcatactccatcaatttcaaaaagagcttacatggcaacgactattttagaaatggtaaaggataaaaattttttagatgtagtatctaaaactacgttcgatgaattcctatctatagtcgtagatcacgttaaatcatctacggatggatgatatagatctttacacaaataattacaagaccgataaatggaaatggataagcgtatgaaatctctcgcaatgacagctttcttcggagagctaaacacattagatattatggcattgataatgtctatatttaaacgccatccaaacaataccattttttcagtggataaggatggtcagtttatgattgatttcgaatacgataattataaggcttctcaatatttggatctgaccctcactccgatatctggagatgaatgcaagactcacgcatcgagtatagccgaacaattggcgtgtgtggatattattaaagaggatattagcgaatatatcaaaactactccccgtcttaaacgatttataaaaaaataccgcaatagatcagatactcgtatcagtcgagatacagaaaagcttaaaatagctctagctaaaggcatagattacgaatatataaaagacgcttgttaataagtaaatgaaaaaaaactagtcgtttataataaaacacaatatggatgccaacatagtatcatcttctactattgcaacgtatatagacgctttagcaaagaatgcttcagaattagaacagaggtctaccgcatacgaaataaataatgaattggaactagtatttattaagccgccattaattactttgacaaatgtagtgaatatctctacgattcaggaatcgtttattcgatttaccgttactaataaggaaggtgtcaaaattagaactaagattccattatctaaggtacatggtctagatgtaaaaaatgtacagttagtagatgctatagataacatagtttgggaaaagaaatcattagtgacggaaaatcgtcttcacaaagaatgcttgttgagactatcgacagaggaacgtcatatatttttggattacaagaaatatggatcctctatccgactagaattagtcaatcttattcaagcaaaaacaaaaaactttacgatagactttaagctaaaatattttctaggatccggtgcccaatctaaaagttctttgttgcacgctattaatcatccaaagtcaaggcctaatacatctctggaaatagaattcacacctagagacaatgaaaaagttccatatgatgaactaataaaggaattgacgactctatcacgtcatatatttatggcttctccagagaatgtaattctttctccgcctattaacgcacctataaagacttttatgttgcctaaacaagatatagtaggtctggatctggaaaatctatatgccgtaactaagactgacggcattcctataactatcagagttacatcaaacgggttgtattgttattttacacatcttgggtatattattagatatccagttaagagaataatagattccgaagtagtagtctttggtgaggcagttaaggataagaactggaccgtatatctcattaagctaatagagcctgtgaatgcaatcaatgatagactagaagaaagtaagtatgttgaatctaaactagtggatatttgtgatcggatagtattcaagtcaaagaaatatgaaggtccgtttactacaactagtgaagtcgtcgatatgttatctacatatttaccaaagcaaccagaaggtgttattctgttctattcaaagggacctaaatctaacattgattttaaaattaaaaaggaaaatactatagaccaaactgcaaatgtagtatttaggtacatgtccagtgaaccaattatctttggagaatcgtctatctttgtagagtataagaaatttagcaacgataaaggctttcctaaagaatatggttctggtaagattgtgttatataacggcgttaattatctaaataatatctattgtttggaatatattaatacacataatgaagtgggtattaagtccgtggttgtacctattaagtttatagcagaattcttagttaatggagaaatacttaaacctagaatcgataaaaccatgaaatatattaactcagaagattattatggaaatcaacataatatcatagtcgaacatttaagagatcaaagcatcaaaataggagatatctttaacgaggataaactatcggatgtgggacatcaatacgccaataatgataaatttagattaaatccagaagttagttattttacgaataaacgaactagaggaccgttgggaattttatcaaactacgtcaagactcttcttatttctatgtattgttccaaaacatttttagacgattccaacaaacgaaaggtattggcgattgattttggaaacggtgctgacctggaaaaatacttttatggagagattgcgttattggtagcgacggatccggatgctgatgctatagctagaggaaatgaaagatacaacaaattaaactctggaattaaaaccaagtactacaaatttgactacattcaggaaactattcgatccgatacatttgtctctagtgtcagagaagtattctattttggaaagtttaatatcatcgactggcagtttgctatccattattcttttcatccgagacattatgctaccgtcatgaataacttatccgaactaactgcttctggaggcaaggtattaatcactaccatggacggagacaaattatcaaaattaacagataaaaagacttttataattcataagaatttacctagtagcgaaaactatatgtctgtagaaaaaatagctgatgatagaatagtggtatataatccatcaacaatgtctactccaatgactgaatacattatcaaaaagaacgatatagtcagagtgtttaacgaatacggatttgttcttgtagataacgttgatttcgctacaattatagaacgaagtaaaaagtttattaatggcgcatctacaatggaagatagaccgtctacaaaaaactttttcgaactaaatagaggagccattaaatgtgaaggtttagatgtcgaagacttacttagttactatgttgtttatgtcttttctaagcggtaaataataatatggtatgggttctgatatccccgttctaaatgcattaaataattccaatagagcgatttttgttcctataggaccttccaactgtggatactctgtattgttaatagatatattaatacttttgtcgggtaacagaggttctacgtcttctaaaaataaaagtttgataacatctggcctgttcataaataaaaacttggcgattctatatatactcttattatcaaatctagccattgtcttatagatgtgagctactgtaggtgtaccatttgattttctttctaatactatatatttctctcgaagaagttcttgcacatcatctgggaataaaatactactgttgagtaaatcagttattttttttatatcgatattgatggacatttttatagttaaggataataagtatcccaaagtcgataacgacgataacgaagtatttatacttttaggaaatcacaatgactttatcagatcaaaattaacaaaattaaaggagcatgtatttttttctgaatatattgtgactccagatacatatggatctttatgcgtcgaattaaatgggtctagttttcagcacggtggtagatatatagaggtggaggaatttatagatgctggaagacaagttagatggtgttctacatccaatcatatatctgaagatatacccgaagatatacacactgataaatttgtcatttatgatatatacacttttgacgctttcaagaataaacgattggtattcgtacaggtacctccgtcgttaggagatgatagctatttgactaatccgttattgtctccgtattatcgtaattcagtagccagacaaatggtcaatgatatgatttttaatcaagattcatttttaaaatatttattagaacatctgattagaagccactatagagtttctaaacatataacaatagttagatacaaggataccgaagaattaaatctaacgagaatatgttataatagagataagtttaaggcgtttgtattcgcttggtttaacggcgtttcggaaaatgaaaaggtactagatacgtataaaaaggtatctaatttgatataatgaattcagtgactgtatcacacgcgccatatactattacttatcacgatgattgggaaccagtaatgagtcaattggtagagttttataacgaagtagccagttggctgctacgagacgagacgtcgcctattcctgataagttctttatacagttgaaacaaccgcttagaaataaacgagtatgtgtgtgcggtatagatccgtatccgaaagatggaactggtgtaccgttcgaatcaccaaattttacaaaaaaatcaattaaggagatagcttcatctatatctagattaaccggagtaattgattataaaggttataaccttaatataatagacggggttataccctggaattattacttaagttgtaaattaggagaaacaaaaagtcacgcgatctactgggataagatttccaagttactgctgcagcatataactaaacacgttagtgttctttattgtttgggtaaaacagatttctcgaatatacgggcaaagttagaatccccggtaactaccatagtgggatatcatccagcggctagagaccgtcaattcgagaaagatcgatcatttgaaattatcaacgttttactggaattagacaacaaggtacctataaattgggctcaagggtttatttattaatgctttagtgaaattttaacttgtgttctaaatggatgcggctattagaggtaatgatgttatctttgttcttaagactataggtgtcccgtcagcgtgcagacaaaatgaagatccaagatttgtagaagcatttaaatgcgacgagttagaaagatatattgagaataatccagaatgtacactattcgaaagtcttagggatgaggaagcatactctatagtcagaattttcatggatgtagatttagacgcgtgtctagacgaaatagattatttaacggctattcaagattttattatcgaggtgtcaaactgtgtagctagattcgcgtttacagaatgcggcgccattcatgaaaatgtaataaaatccatgagatctaatttttcattgactaagtctacaaatagagataaaacaagttttcatattatctttttagacacgtataccactatggatacattgatagctatgaaacgaacactattagaattaagtagatcatctgaaaatccactaacaagatcgatagacactgccgtatataggagaaaaacaactcttcgggttgtaggtactaggaaaaatccaaattgcgacactattcatgtaatgcaaccacctcatgataatatagaagattacctattcacttacgtggatatgaacaacaatagttattacttttctctacaacgacgattggaggatttagttcctgataagttatgggaaccagggtttatttcattcgaagacgctataaaaagagtttcaaaaatattcattaattctataataaactttaatgatctcgatgaaaataattttacaacggtaccactggtcatagattacgtaacaccttgtgcattatgtaaaaaacgatcgcataaacatccgcatcaactatcgttggaaaatggtgctattagaatttacaaaactggtaatccacatagttgtaaagttaaaattgttccgttggatggtaataaactgtttaatattgcacaaagaattttagacactaactctgttttattaaccgaacgaggagaccatatagtttggattaataattcatggaaatttaacagcgaagaacccttgataacaaaactaattttgtcaataagacatcaactacctaaggaatattcaagcgaattactctgtccaagaaaacgaaagactgtagaagctaacatacgagacatgttagtagattcagtggagaccgatacctatccggataaacttccgtttaaaaatggtgtattggacctggtagacggaatgttttactctggagatgatgctaaaaaatatatgtgtactgtatcaaccggatttaaatttgacgatacaaagttcgtcgaagacagtccagaaatggaagagttaatgaatatcattaacgatatccaaccattaacggatgaaaataagaaaaatagagagctatatgaaaaaacattatctagttgtttatgcggtgctaccaaaggatgtttaacattcttttttggagaaactgcaactggaaagtcgacaaccaaacgtttgttaaagtctgctatcggtgacctgtttgttgagacgggtcaaacaattttaacagatgtattggataaaggacctaatccatttatcgctaacatgcatttgaaaagatctgtattctgtagcgaactacctgattttgcatgtagtgggtcaaagaaaatcagatctgataatattaaaaagttgacagaaccttgtgtcattggaagaccgtgtttctccaataaaattaataatagaaaccatgcgacaatcattatcgatactaattacaaacctgtttttgataggatagataacgcattaatgagaagaattgccgtcgtgcgattcagaacacacttttctcaaccttctggtagagaggctgctgaaaataatgacgcgtacgataaagtcaaactattagacgaggggttagatggtaaaatacaaaataatagatatagattcgcatttctatacttgttggtgaaatggtacagaaaatatcatgttcctattatgaaactatatcctacacccgaagagattcctgactttgcattctatctcaaaataggtactctgttggtatctagctctgtaaagcatattccattaatgacggacctctccaaaaagggatatatattgtacgataatgtggtcactcttccgttgactactttccaacagaaaatatccaagtattttaattctagactatttggacacgatatagagagcttcatcaatagacataagaaatttgccaatgttagtgatgaatatctgcaatatatattcatagaggatatttcatctccgtaaatatatgctcatatatttatagaagatatcacatatctaaatgaataccggaattatagatttatttgataatcatgttgatagtataccaactatattacctcatcagttagctactctagattatctagttagaactatcatagatgagaacagaagcgtgttattgttccatattatgggatcaggtaaaacaataatcgctttgttgttcgccttggtagcttccagatttaaaaaggtttacattctagtgccgaacatcaacatcttaaaaattttcaattataatatgggtgtagctatgaacttgtttaatgacgaattcatagctgagaatatctttattcattccacaacaagtttttattctcttaattataacgataacgtcattaattataacggattatctcgctacaataactctatttttatcgttgatgaggcacataatatctttgggaataatactggagaacttatgaccgtgataaaaaataaaaacaagattccttttctactattgtctggatctcccattactaacacacctaatactctgggtcatattatagatttaatgtccgaagagacgatagattttggtgaaattattagtcgtggtaagaaagtaattcagacacttcttaacgaacgcggtgtgaatgtacttaaggatttgcttaaaggaagaatatcatattacgaaatgcctgataaagatctaccaacgataagatatcacggacgtaagtttctagatactagagtagtatattgtcacatgtctaaacttcaagagagagattatatgattactagacgacagctatgttatcatgaaatgtttgataaaaatatgtataacgtgtcaatggcagtattgggacaacttaatctgatgaataatttagatactttatttcaggaacaggataaggaattgtacccaaatctgaaaataaataatggcgtgttatacggagaagaattggtaacgttaaacattagttccaaatttaaatactttattaatcggatacagacactcaacggaaaacattttatatacttttctaattctacatatggcggattggtaattaaatatatcatgctcagtaatggatattctgaatataatggttctcagggaactaatccacatatgataaacggcaaaccaaaaacatttgctatcgttactagtaaaatgaaatcgtctttagaggatctattagatgtgtataattctcctgaaaacgatgatggtagtcaattgatgtttttgttttcatcaaacattatgtccgaatcctatactctaaaagaggtaaggcatatttggtttatgactatcccagatactttttctcaatacaaccaaattcttggacgatctattagaaaattctcttacgccgatatttctgaaccagttaatgtatatcttttagccgccgtatattccgatttcaatgacgaagtgacgtcattaaacgattacacacaggatgaattaattaatgttttaccatttgacatcaaaaagctgttatatctaaaatttaagacgaaagaaacgaatagaatatactctattcttcaagagatgtctgaaacgtattctcttccaccacatccatcaattgtaaaagttttattgggagaattggtcagacaatttttttataataattctcgtattaagtataacgataccaagttacttaaaatggttacatcagttataaaaaataaagaagacgctaggaattacatagatgatattgtaaacggtcacttctttgtatcgaataaagtatttgataaatctcttttatacaaatacgaaaacgatattattacagtaccgtttagactttcctacgaaccatttgtttggggagttaactttcgtaaagaatataacgtggtatcttctccataaaactgatgagatatataaagaaataaatgtcgagctttgttaccaatggataccttccagttacattggagccacacgagctgacgttagacataaaaactaatattaggaatgccgtatataagacgtatctccatagagaaattagtggtaaaatggccaagaaaatagaaattcgtgaagacgtggaattacctctcggcgaaatagttaataattctgtagttataaacgttccgtgtgtaataacctacgcgtattatcacgttggggatatagttagaggaacattaaacatcgaagatgaatcaaatgtaactattcaatgtggagatttaatctgtaaactaagtagagattcgggtactgtatcatttagcgattcaaagtactgcttttttcgaaatggtaatgcgtatgacaatggcagcgaagtcactgccgttctaatggaggctcaacaaggtatcgaatctagttttgtttttctcgcgaatatcgtcgactcataagaaagagaatagcggtaagtataaacacgaatactatggcaataattgcgaatgttttattcccttcgatatatttttgataatatgaaaaacatgtctctctcaaatcggacaaccatctcataaaatagttatctcgcgctggcgaggtggttgccgctcgtataatctccccagaataatatacttgcgtgtcgtcgttcaatttatacggatttctatagttctctgttatataatgcggttttccatcatgattagacgacgacaatagtgttctaaatttagatagttgatcagaatgaatgtttattggcgttggaaaaattatccatgctgcgtctgcagagtggttgatagttgttcctagatatgtaaaataatccaacgtactaggtagcaaattgtctagataaaatactgaatcaaacggcgcagacgtattagcggatctaatggaatccaattgattgactatcttttgaaaatatacatttttatgatccgatacttgtaagaatatagaaataatgataagtccatcatcgtgtttttttgcctcttcataagaactatattttttcttattccaatgaacaagattaatctctccagagtatttgtacacatctatcaagtgattggatccataatcgtcttcctttccccaatatatatgtagtgatgataacacatattcattggggagaaaccctccacttatatatcctcctttaaaattaatccttactagttttccagtgttctggatagtggttggtttcgactcattataatgtatgtctaacggcttcaatcgcgcgttagaaattgcttttttagtttctatattaataggagatagttgttgcggcatagtaaaaatgaaatgataactgtttaaaaatagctcttagtatgggaattacaatggatgaggaagtgatatttgaaactcctagagaattaatatctattaaacgaataaaagatattccaagatcaaaagacacgcatgtgtttgctgcgtgtataacaagtgacggatatccgttaataggagctagaagaacttcattcgcgttccaggcgatattatctcaacaaaattcagattctatctttagagtatccactaaactattacggtttatgtactacaatgaactaagagaaatctttagacggttgagaaaaggttctatcaacaatatcgatcctcactttgaagagttaatattattgggtggtaaactagataaaaaggaatctattaaagattgtttaagaagagaattaaaagaggaaagtgatgaacgtataacagtaaaagaatttggaaatgtaattctaaaacttacaacacgggataaattatttaataaagtatatataggttattgcatggcgtgttttattaatcaatcgttggaggatttatcgcatactagtatttacaatgtagaaattagaaagattaaatcattaaatgattgtattaacgacgataaatacgaatatctgtcttatatttataatatgctagttaatagtaaatgaacttttacagatctagtataattagtcagattattaagtataatagacgactagctaagtctattatttgcaaggatgactctcaaattattacactcacggcattcgttaaccaatgcctatggtgtcataaacgagtatccgtgtccgctattttattaactactgataacaaaatattagtatgtaacagacgagatagttttctctattctgaaataattagaactagaaacatgtttagaaagaaacgattatttctgaattattccaattatttgtccaaacaggaaagaagtatactatcgtcatttttttctctatatccagctactgctgataatgatagaatagacgctatttatccgggtggcatacccaaaaggggtgagaatgttccagagtgtctatccagggaaatcaaagaagaagttaatatagacaattcttttgtattcatagacactcggttttttattcatggtatcatagaagataccattatcaacaaattttttgaggtaattttctttgtcggaagaatatctctaacgagtgatcaaattattgatacctttaaaagtaatcatgaaatcaaggatctaatatttttagatccgaattcaggtaatggactccaatacgaaattgcaaaatatgctctagatactgcaaaacttaaatgttacggccatagaggatgttattatgaatcattaaaaaaattaactgaggatgattgattagaaaatataaattaatttaccatcgtgtatttttataacgggattgtccggcatatcatgtagatagttaccgtctacatcgtatactcgaccatctacgcctttaaatcctctatttattgacattaatctattagaattggaataccaaatattagtaccctcaattagtttattggtaatattttttttagacgatagatcgatggctcttgaaaccaaggttttccaaccggactcattgtcgatcggtgagaagtctttttcattagcatgaatccattctaatgatgtatgtttaaacactctaaacaattggacaaattcttttgatttgctttgaatgatttcaaataggtcttcgtctacagtaggcataccattagataatctagccattataaagtgcacgtttacatatctacgttctggaggagtaagaacgtgactattgagacgaatggctcttcctactatctgacgaagagacgcctcgttccatgtcatatctaaaatgaagatatcattaattgagaaaaaactaataccctcgcctccactagaagagaatacgcatgttttaatgcattctccgttagtgtttgattcttggttaaactcagccaccgccttgattctagtatcttttgttctagatgagaactctatattagagataccaaagactttgaaatatagtaataagatttctattcctgactgattaacaaatggttcaaagactagacatttaccatgggatgctaatattcccaaacatacatctataaatttgacgcttttctcttttaattcagtaaatagagagatatcagccgcactagcatcccctttcaatagttctccctttttaaaggtatttaatgcggatttagaaaactctctatctcttaatgaatttttaaaatcattatatagtgttgctatctcttgcgcgtattcgccgggatcacgattttgtctttcaggaaagctatcgaacgtaaacgtagtagccatacgtctcagaattctaaatgatgatataccagtttttatttctgcgagtttagccttttgataaatctcttcttgcttttttgacatattaacgtatcgcattaatactgttttcttagcgaatgatgcagacccttctacgttatcaaaaatagaaaactcgttattaactatgtacgaacataggcctcctagtttggagactaattctttttcatcgactagacgtttattctcaaatagtgattggtgttgtaaggatcctggtcgtagtaagttaaccaacatggtgaattcttgcacactattgacgataggtgtagccgataaacaaatcatcttatggttttttaatgcgatggtcttggataaaaaattatatactgaacgagtaggacggatcttaccatcttctttgattaatgatttagaaatgaagttatgacattcatcaataatgacgcatattctactcttggaattaatagttttgatattagtaaaaaatttatttctaaaattttgatcatcgtaattaataaaaatacaatccttcgttatctctggagcgtatctgagtatagtgttcatccaaggatcttctatcaaagcctttttcaccaataagataatagcccaattcgtataaatatccttaagatgtttgagaatatatacagtagtcattgttttaccgacacccgtttcatggaacaataaaagagaatgcatactgtctaatcctaagaaaactcttgctacaaaatgttgataatccttgaggcgtactacgtccgaccccatcatttcaacgggcatattagtagttctgcgtaaggcataatcgatataggccgcgtgtgatttactcatttatgagtgataagtaataactatgttttaaaaatcacagcagtagtttaactagtcttctctgatgtttgttttcgatactttttgaatcagaagtcatactagaataaagcaacgagtgaacgtaatagagagcttcgtatactctattcgaaaactctaagaacttattaatgaattccgtatccactggattgtttaaaatactaaattgaacactgttcacatccttccaagaagaagacttagtgacggacttaacatgagacataaataaatccaaattttttttacaaacatcactagccaccataatggcgctatctttcaaccagctatcgcttacgcattttagcagtctaacatttttaaagagactacaatatattctcatagtatcgattacacctctaccgaataaagttggaagtttaataatacaatatttttcgtttacaaaatcaaataatggtcgaaacacgtcgaaggttaacatcttataatcgctaatgtatagattgttttcagtgagatgattattagatttaatagcatctcgttcacgtttgaacagtttattgcgtgcgctgaggtcggcaactacggcgtccgctttagtactcctcccataatactttacgctattaatctttaaaatttcatagactttatctagatcgctttctggtaacatgatatcatgtgtaaaaagttttaacatgtcggtcggcattctatttagatcattaactctagaaatctgaagaaagtaattagctccgtattccagactaggtaatgggcttttacctagagacagattaagttctggcaatgtttcataaaatggaagaaggacatgcgttccctcccggatattttttacaatttcatccatttacaactctatagtttgttttcattattattagttattatctcccataatcttggtaatacttaccccttgatcgtaagataccttatacaggtcattacatacaactaccaattgtttttgtacataatagattggatggttgacatccatggtggaataaactactcgaacagatagtttatctttccccctagatacattggccgtaatagttgtcggcctaaagaatatctttggtgtaaagttaaaagttagggttcttgttccattattgctttttgtcagtagttcattataaattctcgagatgggtccgttctctgaatatagaacatcatttccaaatctaacttctagtctagaaataatatcggtcttattcttaaaatctattcccttgatgaagggatcgttaatgaacaaatccttggcctttgattcggctgatctattatctccgttatagacgttacgttgactagtccaaagacttacaggaatagatgtatcgatgatgttgatactatgtgatatgtgagcaaagattgttctcttagtggcatcactatatgttccagtaatggcggaaaactttttagaaatgttatatataaaagaattttttcgtgttccaaacattagcagattagtatgaagataaacactcatattatcaggaacattatcaatttttacatacacatcagcatcttgaatagaaacgataccatcttctggaacctcaacaatctcggcagactccggataaccagtcggtggaccatcgctaacaataactagatcatccaacaatctactcacatatgcatctatataatctttttcatcttgtgagtaccctggatacgaaataaatttattatccgtatttccataataaggtttagtataaacagagagcgatgttgccgcatgaacttcagttacagtcgccgttggttggtttatttgacctattactctcctaggtttctctataaacgatggtttaatttgtacattcttaaccatatatccaataaagctcaattcaggaacataaacaaattctttgttgaacgtttcaaagtcgaacgaagagtcacgaataacgatatcggatactggattgaaggttaccgttacggtaatttttgaatcggatagtttaagactgctgaatgtatcttccacatcaaacggagttttaatataaacgtatactgtagatggttctttaatagtgtcattaggagttaggccaatagaaatatcattaagttcactagaatatccagagtgtttcaaagcaattgtattattgatacaattattatataattcttcgccctcaatttcccaaataacaccgttacacgaagagatagatacgtgattaatacatttatatccaacatatggtacgtaaccgaatcttcccatacctttaacttctggaagttccaaactcagaaccaaatgattaagcgcagtaatatactgatccctaatttcgaagctagcgatagcctgattgtctggaccatcgtttgtcataactccggatagagaaatatattgcggcatatataaagttggaatttgactatcgactgcgaagacattagaccgtttaatagagtcatccccaccgatcaaagaattaatgatagtattattcattttctatttaaaatggaaaaagcttacaataaactccgtagagaaatatctataatttgtgagttttccttaaagtaacagcttccgtaaacgccgtctttatctcttagtaagtttattgtatttataaccttttccttatcttcatagaatactaaaggcaacaaagaaatttttggttcttctctaagagctacgtgagacttaaccatagaagccaacgaatccctacatattttagaacagaaataccctacttcaccacccttgtatgtctcaatactaataggtctaaaaaccaaatcttgattacaaaaccaacacttatcaattacactatttgtcttaatagacacatctgccatagatttataatactttggtagtatacaagcgagtgcttcttctttagcgggcttaaagactgctttaggtgctgaaataaccacatctggaaggcttactcgcttagccatttaattacggaactatttttttatacttctaatgagcaagtagaaaacctctcatctacaaaaacatactcgtgtccataatcctctaccatagttacacgttttttagatctcatatgtgctaaaaagttttcccatactaattggttactattatttttcgtataatttttaacagtttgaggttttagatttttagttacagaagtgatatcgaatattttatccaaaaagaatgaataattaattgtcttagaaggagtgttttcttggcaaaagaataccaagtgcttaaatatttctactacttcattaatcttttctgtactcagattcagtttctcatcttttacttgattgattatttcaaagactaacttataatcctttttatttattctctcgttagccttaagaaaactagatacaaaatttgcatctacatcatccgtggatatttgatttttttccatgatatccaagagttccgagataatttctccagaacattgatgagacaataatctccgcaatacatttctcaaatgaataagtttattagacacgtggaagtttgactttttttgtacctttgtacatttttgaaataccgactcgcaaaaaatacaatattcatatccttgttcagatactataccgttgtgtctacaaccgctacataatcgtagattcatgttaacactctacgtatctcgtcgtccaatattttatataaaaacattttatttctagacgttgccagaaaatcctgtaatacttttagttttttgggctgtgaataaagtatcgccctaatatggttaccgtcctccgccaatatagtagttaaattatccgcacatgcaaaagaacaccgcttaggcggattcagtacaatgttatatttttcgtaccaactcatttaaatatcataatctaaaatagttctgtaatatgtctagcgctaatatattgatcataatcctgtgcataaattaagatacaacaatgtctcgaaatcatcgacatggcttcttccatagttagaagatcgtcgtcaaagttagcaacgtgattcatcaacatttgctgttttgaggcagcaaatactgaaccgtcgccattcaaccattcataaaaaccatcgtctgaatccattgataatttcttgtactggtttttgagagctcgcatcaatctagcatttctagctcccggattgaaaacagaaagaggatcgtacatccagggtccattttctgtaaatagaatcgtataatgtcccttcaagaagatatcagacgatccacaatcaaagaattggtctccgagtttgtaacaaactgcggactttaacctatacatgataccgtttagcataatttctggtgatacgtcaatcggagtatcatctattagagatctaaagccggtgtaacattctccaccaaacatattcttattctgacgtcgttctacataaaacatcattgctccattaacgataacaggggaatgaacagcactacccatcacattagttcccaatggatcaatgtgtgtaactccagaacatcttccatagcctatgttaggaggagcgaacaccactcttccactattgccatcgaatgccatagaataaatatccttggaattgatagaaatcggactgtcggatgttgtgatcatcttcataggattaacaacgatgtatggtgccgcctgaagtttcatatcgtaactgatgccgttcataggtctagccacagaaaccaacgtaggtctaaatccaactatagacaaaatagaagccaatatctgttcctcatctgtcataacttgagagcatccagtatgaataatcttcattagatggggatctaccgcatcatcatcgttacaataaaaaattcccattctaatgttcataattgcttttctaatcatggtatgcatgtttgctctctgaatctctgtggaaattagatctgatacacctgtaatcactatcggattatcctccgtaagacgattaaccaacaacatataattataagactttacttttctaaattcataaagttgctggattaggctataggtgtctccatgtacatacgcgttctcgagcgcaggaagtttaataccgaatagtgccatcagaataggatgaatatagtaattagtttctggttttctataaataaaagacaaatcttgtgaactagacatatcggtaaaatgcatggattggaatcgtgtagtcgacagaagaatatgatgattagatggagagtatattttatctaactctttgagttggtcaccgattctaggactagctcgagaatgaataagtactaaaggatgagtacatttcacagaaacactagcattgttcaatgtgctctttacatgggtaaggagttgaaatagctcgtttctatttgttctgacaatatttagtttattcataatgttaagcatatcctgaatagtaaagttagatgtgtcatacttgttagtagttagatatttagcaattgcattcccatcatttctcaatctcgtactccaatcatgcgtggatgctacttcgtcgatggaaaccatacaatcctttttgataggctgttgagattgattatttcctgcacgtttaggtttggtacgttgatttctagcccctgcggatataaagtcatcgtctacaatttgggacaatgaattgcatacactacaagacaaagatttatcagaagtgtgaatatgatcttcatctaccaaagaaagagtttgattagtataactagattttagtcctgcgttagatgttaaaaaaacatcgctattgaccacggcttccattatttatattcgtagtttttactcgaaagcgtgattttaatatccaatcttattacttttggaatcgttcaaaacctttgactagttgtagaatttgatctattgccctacgcgtatactcccttgcatcatatacgttcgtcaccagatcgtttgtttcggcctgaagttggtgcatatctttttcaacactcgacatgagatccttaagggccatatcgtctagattttgttgagatgctgctcctggatttggattttgttgtgctgttgtacatactgtaccaccagtaggtgtaggagtacatacagtggccacaataggaggttgaggaggtgtaaccgttggagtagtacaagaaatatttccatccgattgttgtgtacatgtagttgttggtaacgtctgagaaggttgggtagatggcggtgtcgtcgtcttttgatctttattaaatttagagataatatcctgaacagcattgctcggcgtcaacgctggaaggagtgaactcgccggcgcatcagtatctgcagacagccaatcaaaaagattagacatatcagatgatgtattagtttgttgtcgtggttttggtgtaggagcagtactactaggtagaagaataggagccgatgtaggtgtcggaaccggctgtggagttatatgaatagttggttgtagcggttggataggctgtctgctggcggccatcatattatctctagctagttgttctcgcaactgtctttgataatacgactcttgagactttagtcctatttcaatcgcttcatcctttttcgtatccggatccttttcttcagaataatagattgacgactttggtgtagaggattctgccagcccctgtgagaacttgttaaagaagtccatttaaggctttaaaattgaattgcgattataagattaaatggcagacacagacgatattatcgactatgaatccgatgatctcactgaatacgaggatgatgaagaagaggaagaagatggagagtcactagaaactagtgatatagatcccaaatcttcttataagattgtagaatcagcatccactcatatagaagatgcgcattccaatcttaaacatatagggaatcatatatctgctcttaaacgacgctatactagacgtataagtctatttgaaatagcgggtataatagcagaaagctataacttgcttcaacgaggaagattacctctagtttcagaattttctgacgaaacgatgaagcaaaatatgctacatgtaattatacaagagatagaggagggttcttgtcctatagtcatcgaaaagaacggagaattgttgtcggtaaacgattttgacaaagatggtctaaaattccatctagactatattatcaaaatttggaaacttcaaaaacgatattagaatttatacgaatatcgttctctaaatgtcacaatcaagtctcgcatgttcagcaatttattgtcgtactttatatcgtgttcattaacgatatcttgcaaaatagtaatgattctatcttccttcgatagatattcttcagagattattgtcttatattctttcttgttatcagatatgaatttgataagactttgaacattattgatacccgtctgtttaattttttctacagatattttagttttggcagattctatcgtatctgtcaatagacatccaacatcgacattcgacgtcaattgtctataaatcaacgtataaattttagaaataacattagcgaattgttgtgcattgatgtcgttattctgaaacagtatgattttaggtagcattttcttaacaaagagaacgtatttattgttactcagttgaacagatgatatatccagattactaacgcatctgattccgtataccaaactttcagaagaaatggtatacaattgtttgtattcattcaatgtctctttttcagaaattagtttagagtcgaatactgcaataattttcaagagatagttttcatcagataagattttatttagtgtagatatgataaaactattgttttgttggagaacttgatacgccgcgttctctgtagtcgacgctctcaaatgggaaacgatctccattatttttttggaatcggatactatatcttcggtatcttgacgcagtctagtatacatagagttaagagagattagagtttgtacattaagcaacatgtctctaaatgtggctacaaacttttccttttccacatcatctagtttattatataccgatttcacaacggcaccagatttaaggaaccagaatgaaaaactctgataactacaatatttcatcatagttacgattttatcatcttctatagttggtgtaatagcgcatacctttttctccaagactggaaccaacgtcataaaaatgtttaaatcaaaatccatatcaacatctgatgcgctaagaccagtctcgcgttcaagattatctttactaatggtgacgaactcatcgtatagaactctaagtttgtccattatttatttacagatttagttgtttaatttatttgtgctcttccagagttgggatagtatttttctaacgtcggtattatattattaggatctacgttcatatgtatcataatattaatcatccacgttttgataaatctatctttagcttctgaaataacgtatttaaacaaaggagaaaaatatttagctacggcatcagacgcaataacattttttgtaaatgtaacgtatttagacgacagatcttcgttaaaaagttttccatctatgtagaatccatcagttgttaacaccattcccgcgtcagattgaataggagtttgaatagtttgttttggaaatagatccttcaataacttatagttgggtgggaaaaaatcgattttatcactagactctttcttttttactatcattacctcatgaactatttcttgaatgagtatatgtattttctttcctatatcggacgcgttcattggaaaatataccatgtcgttaactataagaatatttttatcctcgtttacaaactgaataatatcagatgtagttcgtaaacgaactatatcatcaccagcacaacatctaactatatgatatccactagtttcctttagtcgtttattatcttgttccatattagcagtcattccatcatttaagaaggcgtcaaagataatagggagaaatgacattttggattctgttacaactttaccaaaattaaggatatacggacttactatctttttctcaacgtcaatttgatgaacacacgatgaaaatgtacttcgatgagattgatcatgtagaaaacaacaagggatacaatatttccgcatatcatgaaatatattaagaaatcccaccttattatatttccccaaaggatccatgcacgtaaacattatgccgttatcattaataaagacttctttctcatcggatctgtaaaagttgttactgatttttttcattccaggatctagataattaataatgatgggttttctattcttattctttgtattttggcatatcctagaccagtaaacagtttccactttggtaaaatcagcagacttttgaacgctattaaacatggcattaatggcaataactaaaaatgtaaaatatttttctatgttaggaatatggtttttcactttaatagatatatggtttttggccaaaatgatagatatttttttatccgaggatagtaaaatattattagtcgccgtctctataaaaatgaagctagtctcgatatccaattttattctagaattgataggagtcgccaaatgtaccttatacgttatatctcccttgatgcgttccatttgtgtatctatatcggacacaagatctgtaaatagttttacgttattaatcatcacggtatcgccgtcgctagataatgctaatgtaccatccaagtcccaaatggagagatttaactgttcatcgtttagaataaaatgattaccggtcatattaataaagtgttcatcgtatctagataacaacgacttataattaatgtccaagtcttgaactcgctgaatgatcttttttaacccagttagttttagattggtacgaaatatattgttaaactttgattctacagtaatgtccaaatctagttgtggaaatacttccatcaacattgtttcaaacttgataatattattatctacatcttcatacgatccaaattccggaatagatgtatcacatgctcttgccacccagataaccaaaaagtcacacgctccaggatatacattgtataaaaagctatcgtttttaagtagggtttttttctgcgtgtatacgaagggattaaaaatagtattatcaacgtaactatattccaaattattcttatgagaatagataataatatcgtccttaatatctaacaaatttcctaaatatccctttaattgagtcattcgaagcgtcaatagaatatgtctcttaactatttccggctgttgtatatttaaatgacttcgtaaaaaataatatatgggcgacttctcatctatgtaatcatatggagtgagatatagggctcgttctacctcctgccccttacccacctgtaataccaattgcggacttactatatatcgcatatttatatcgtggggtaaagtgaaaatctactaccgatgatgtaagtcttacaatgttcgaaccagtaccagatcttaatttggaggcctccgtagaactaggggaggtaaatatagatcaaacaacacctatgataaaggaaaatagcggttttatatcccgtagtagacgtctattcgcccatagatctaaggatgatgagagaaaactagcactacgattctttttacaaagactttattttttagatcatagagagattcattatttgttcagatgcgttgacgctgtaaaagacgtcactattaccaaaaaaaataacattatcgtggcgccttatatagcacttttaactatcgcatcaaaaggatgcaaacttacagaaacaatgattgaagcattctttccagaactatataatgaacatagtaagaaatttaaattcaactctcaagtatccatcatccaagaaaaactcggataccagtttggaaactatcacgtttatgattttgaaccgtattactctacagtagctctggctattcgagatgaacattcatctggcatttttaatatccgtcaagagagttatctggtaagttcattatctgaaataacatatagattttatctaattaatctaaaatctgatcttgttcaatggagtgctagtacgggcgctgtaattaatcaaatggtaaatactgtattgattacagtgtatgaaaagttacaactggtcatagaaaatgattcacaatttacatgttcattggctgtggaatcagaacttccaataaaattacttaaagatagaaatgaattatttacaaaattcatcaacgagttaaaaaagaccagttcattcaagataagcaaacgcgataaggatacgctactaaaatattttacttaggactggagttagaatttatagacgactcatttcgtttatcattattactaccatcattattagtattcttcttgttatcttgttcagaaatatacagcaatgctatgcctaatactaaatacattatcatgcttgcaatggctctaacaacgacgaaccaaaatgaatttggtcgtagcttttgttcacaaaaatacataaagaaatgtctacataaatctatggcgccattggctacttgaaatagcgccagtcctcctacagattttaatatagctgtataacatgacatttattcatcatcaaaagagacagagtcaccatctgtcatatttagattttttttcatgtgttcaaagtatcctctactcatttcattataatagtttatcatacttagaattttaggacggatcaatgagtaagacttgactagatcgtcagtagtaatttgtgcatcgtctattctgcatccgcttcgtcgaataatgtatagcatcgctttgagattctccatagctatcaagtctttatacaatgacatggaaatatctgtgaatactttatacttctccaacatcgatgccttaacatcatcgcctactttagcattgaaaatacgttctattgtgtagatggatgtagcaagatttttaaacaacaatgccatcttacacgatgattgcctcaagtctccaatcgtttgtttagaacgattagctacagagttcaacgcttggctgactagcatattattatctttagaaattgtattcttcaatgaagcgtttatcatatctgtgatttcgttagtcatattacagtctgactgggttgtaatgttatccaacatatcacctatggatacggtacacgtaccagcatttgtaataatcctatctaagatgttgtatggcattgcgcagaaaatatcttctcctgtaatatctccactctcgataaatctactcagattattcttaaatgccttattctctggagaaaagatatcagtgtccatcatttcattaatagtatacgcagaaaagataccacgagtatcaattctatccaagatacttatcggttccgagtcacagataatggtttcctctccttcgggagatcctgcatagaaatatctaggacaatagtttctatactgtctgtaactctgataatctctaaagtcactaactgataccatgaaattgagaagatcaaacgctgaagtaatcaatttttctgcctcgtttttactacaactagttttcatcaatgtagtgacgatgtattgtttagttactcttggtctaatactgatgatagagatattattacttcccataatggatcttctagtagtcaccttaaagcccattgatgcaaatagcagatagataaagtcttggtatgactcctttctaatatagtacggactacctttgtcacccaactttatacccacataagccataacaacctctttaatagccgtttcatgaggtttatcagccatgagcctgagtagttggaagaatctcatgaatcccgtctcagaaagtcctatatgcatgatagatttatctttcctgggaaactctcgtatagtcatagatgaaatactcttcaaagtttctgaaataagattagtaacagtcttacctccgactactctgggtaacaaacatactctaataggtgttttctctgcggagataatatcagaaaggatagagcaataagtagtattattgtgattataaagaccgaatacataacaggtagaatttataaacatcatgtcctgaaggtttttagacttgtattcctcgtaatccataccgtcccaaaacatggatttggtaactttgatagccgtagatctttgttccttcgccaacaggttaaagaaattaataaagaatttgttgtttctatttatgtccacaaattgcacgtttggaagcgtaactgttacgttcactgcagcattttgaggatcgcgagtatgaagtacgatgttattgtttactggtatatctggaaagaaatctaccagtctaggaataagagattgatatcgcatagaaatagtaaagtttataatctcatcatcgaagagcattttgttaccattgtaataaatatccactctgtcatatgtataaatgaagtactgttcaaacatgatgagatgtttatatgttggcatagtagtgagatcgacgtttggtaatggcaatgtattaagattaactccataatgtctagcagcatctgcgatgttataagtgtcgtcaaagcggggtcgatcttgtgctgttatatattgtctaacacctataagattatcaaaatcttgtctgcttaatacaccgttaacaatttttgccttgaattcttttattggtgcattaataacatccttatagaggatgttaaacaaataagtgttatcaaagttaagatctggatatttcttttctgctagaacatccattgagtcggagccatctggtttaatataaccaccgataaatctagctctgtattctgtatccgtcaatctaatattaagaaggtgttgagtgaaaggtggaagatcgtaaaagctgtgagtattaatgataggattagtttccgaactaatgttaattggggtattaataatatctatatttccagcgttaagtgtaacattaaacagttttaattcacgtgacgtggtatcaattaaataattaatgcccaatttggatatagcagcctgaagctcatcttgtttagttacggatcctaatgagttattaagcaatatatcgaacggatgaacgaaggttgttttaagttggtcacatactttgtaatctagacatagatgcggaagaacggtagaaactatacgaaataaatattcagagtcctctaattgatcaagagtaactattgacttaataggcatcatttatttagtattaaatgacgaccgtaccagtgacggatatacaaaacgatttaattacagagttttcagaagataattatccatctaacaaaaattatgaaataactcttcgtcaaatgtctattctaactcacgttaacaacgtggtagatagagaacataatgccgccgtagtgtcatctccagaggaaatatcctcacaacttaatgaagatctatttccagatgatgattcaccggccactattatcgaacgagtacaacctcatactactattattgacgatactccacctcctacttttcgtagagagttattaatatcggaacaacgtcaacaacgagaaaaaagatttaatattacagtatcgaaaaatgctgaagcaataatggaatctagatctatgataacttctatgccaacacaaacaccatccttgggagtagtttatgataaagataaaagaattcagatgttagaggatgaagtggttaatcttagaaatcaacgatctaatacaaaatcatctgataatttagataattttaccaaaatactatttggtaagactccgtataaatcaacagaagttaataagcgtatagccatcgttaattatgcaaatttgaacgggtcccccttatcagttgaggacttggatgtttgttcggaggatgaaatagatagaatctataaaacgattaaacaatatcacgaaagtagaaaacgaaaaattatcgtcactaacgtgattattattgtcataaacattatcgagcaggcattgctaaaactcggatttgaagaaatcaaaggactgagtaccgatatcacttcagaaattatcgatgtggagatcggagatgactgcgatgctgtagcatctaaactaggaatcggtaacagtccggttcttaatattgtattgtttatactcaagatattcgttaaacgaattaaaattatttaatttaatacattcccatatccagacaacaatcgtctggattaatctgttcctgtcgtctcataccggacgacatattaatctttttattagtaggcatctttttagatggtttctttttcccagcattaactgagtcgatacctagaagatcgtgattgatctctccgaccattccacgaacttctaattggccgtctctgacggtaccataaactattttaccagcattagtaacagcttggacaatctgaccatccattgcgttgaatgatgtagttgctgttgttctacgtttaggagcaccagaagtatttttggagcccttggaggctgatgtagaagaagacgaggattttgatttacatgtaatacattttgtactctttgattttgtatcacatgcgccggcagtcacatttgtttgagaattaagattattgttgcctcctttgacggctgcatctccaccgatttgcgctagtagatttttaagctgtggtgtaatcttattaactgtttcgatataatcatcgtaactgcttctaacggctaaattttttttatccgccatttagaagctaaaaatatttttatttatgcagaagatttaactagattatacaatgaactaatatgatccttttccagattatttacaaacttggtattttttggttctggaggaggcgaatttaaattcggacttggattcggattttgtgagttcttgatcttattatacatcgagtataggatggcgacggtaactgctacgcaaataccgatcaacaaaagaataccaatcatttattgacaataacttcactattgatcaagtatgcaatatatcatcttttcactaaataagtagtaataatgattcaacaatgtcgagatatatggacgataataatttagttcatggaaatatcgctatgattggtatgaatgactccgctaactctgtggggtgcgcagtgctttccccacatagaataaattagcattccgactgtgataataataccaagtataaacgccataatactcaatactttccatgtacgagtgggactggtagacttactaaagtcaataaaggcgaagatacacgaaagaatcaaaagaatgattccagcgattagcacgccggaaaaataatttccaatcataagcatcatgtccatttaactaataaaaattttaaatcgccgaatgaacaaagtggaatataaaccatataaaaacaatagtttgtactgcaaaaataatatctatttttgttttcgaagatatggtaaaattaaatagtagtacacagcatgttataactaacagcagcaacggctcgtaattacttatcatttactagacgaaaaggtggtgggatattttcttgctcaaataatacgaatatatcacccatccattttatgcgatgtttatatactctaatctttaatagatctatagacgacgggtttaccaacaatatagattttatcgattcatctaatttaaacccttccttaaacgtgaatgatctattatctggcataacgatgactctacctgatgaatcggacaatgtactgggccatgtagaataaattatcaacgaattatcgtctacgaacatttatatcatttgttttaattttaggacgcgaataaatggatataaaatagaaaataacagatattacaaccaatgttatggccgcgcccaaccaggtaggcagttttattttatcttttactacaggttctcctggatgtacgtcaccaacggcggacgtagttctagtacaattagacgtaagttctgcttgggaattttttaacgctaaagagttaacgttaatcgtgcacccaacgtatttacatctagttctttgaacatcttgattataatataaccattttctatctctagattcgtcggtgcactcatgtaaccaacataccctaggtcctaaatatttatctccggaattagattttggataattcgcgcaccaacaatttctatttcctttatgatcgttacaaaagacgtataatgccgtatccccaaaagtaaaataatcaggacgaataattctaataaactcagaacaatatctcgcatccatatgtttggagcaaatatcggaataagtagacatagccggtttccgttttgcacgtaaccattctaaacaattggggtttccaggatcgtttctacaaaatccagtcatgaaatcatcacaatgttctgtcttgtaattattattaaatatttttggacagtgtttggtatttgtcttagaacaacattttgccacgctatcactatcgcccaggagataatccttttttataaaatgacatcgttgcccggatgctatataatcagtggcgtgttttaaatccttaatatattcaggagttacctcgttctgataatagattaatgatccaggacgaaatttgaaagaactacatggttctccatgaattaatacatattgtttagcaaattcaggaactataaaactactacaatgatctatcgacataccatctatcaaacaaaacttgggtttaatttctcccggagatgtttcataatagtacgtataactttcttctgcaaacttaacagctctattatattcaggataattaaaacctaattccatatatttgtctcgtatatctgctattcctggtgctattttaattctattaagagtaacggctgcccccattcttaataatcgtcagtatttaaactgttaaatgttggtatatcaacatctaccttatttcccgcagtataaggtttgttgcaggtatactgttcaggaatggttacatttatacttcttctatagtcctgtctttcgatgttcatcacatatgcaaagaacagaataaacaaaataatgtaagaaataatattaaatatctgtgaattcgtaaatacattgattgccataataattacagcagctacaatacatacaatagacattcccacagtgttgccattacctccacgatacatttgagttactaagcaataggtaataactaagctagtaagaggcaatagaaaagatgagataaatatcatcaatatagagattagaggagggctatatagagccaagacgaacaaaatcaaaccgagtaacgttctaacatcattatttttgaagattcccaaataatcattcattcctccataatcgttttgcattatacctccatctttaggcataaacgattgctgctgttcctctgtaaataaatctttatcaagcactccagcacccgcagagaagtcgtcaagcatattgtaatatcttaaataactcatttatatattaaaaaatgtcactattaaagatggagtataatctttatgccgaactaaaaaaaatgacttgtggtcaacccctaagtctttttaacgaagacggggatttcgtagaagttgaaccgggatcatcctttaagtttctgatacctaagggattttacgcctctccttccgtaaagacgagtctagtattcgagacattaacaacgaccgataataaaatcactagtatcaatccaacaaatgcgccaaagttatatcctcttcaacgcaaagtcgtatctgaagtagtttctaatatgaggaaaatgatcgaatcaaaacgtcctctatacattactcttcacttggcgtgtggatttggtaagactattaccacgtgttatcttatggctacacacggtagaaaaaccgtcatttgcgtacccaataaaatgttaatacatcaatggaagacacaggtagaggcagtcggattggaacataagatatctatagatggagtaagtagtctattaaaggaactaaagactcaaagtccggatgtattaatagtagtcagtagacatctgacaaacgatgccttttgtaaatatatcaataagcattatgatttgttcatcttggatgaatcacatacgtataatctgatgaacaatacagcagttacaagatttttagcgtattatcctccgatgatgtgttattttttaactgctacacctagaccagctaaccgaatttattgtaacagtattattaatattgccaagttatccgatctaaaaaaaactatctatgcggtagatagtttttttgagccatattccacagacaatattagacatatggtaaaacgactagatggaccatctaataaatatcatatatatactgagaagttattatctgtagacgagcctagaaatcaacttattcttgataccctggtagaagaattcaagtcaggaactattaatcgaattttagttattactaaactacgtgaacatatggtattcttctacaaacgattattagattttttcggatcagaggttgtatttataggagacgcccaaaatagacgtactccagatatggtcaaatcaatcaaggaactaaatagatttatattcgtatccaccttattttattccggtactggtttagatattcctagtttggattcgttgttcatttgctcggcagtaatcaacaatatgcaaatagagcaattactagggagggtatgtcgagaaacagaactattagataggacggtatatgtatttcctaacacatccatcaaagaaataaagtacatgataggaaatttcatgcaacgaattattagtctgtctgtagataaactaggatttaaacaaaaaagttatcggaaacatcaagaatccgatcccacttctgtatgtacaacatcctccagagaagaacgtgtattaaatagaatatttaactcgcaaaatcgttaagaagtttaagcgacgatccgcatgctgcgcaggccagtgtattacccctcatagtattaatataatccaatgatacttttgtgatgtcggaaatcttaaccaatttagactgacaggcagaacacgtcatgcaatcatcatcgtcatcgataactgtagtcttgggcttctttttgcggctcttcattccggaacgcacattggtgctatccatttaggtagtaaaaaataagtcagaatatgccctatagcacgatcgtgcaaaacctggtatatcgtctctatctttatcacaatatagtgtatcgacatttttattattattgacctcgtttatcttggaacatggaatgggaacatttttgttatcaacggccatctttgccttaattccagatgttgtaaaattataactaaacagtctatcatcgacacaaatgaaattcttgtttagacgtttgtagtttacgtatgcggctcgttcgcgtctcattttttcagatattgcaggtactataatattaaaaataagaatgaaataacataggattaaaaataaagttatcatgacttctagcgctgatttaactaacttaaaagaattacttagtctgtacaaaagtttgaaattttcagattctgcggctatagaaaagtataattctttggtagaatggggaacatctacttactggaaaataggcgtgcaaaaggtagctaatgtcgagacgtcaatatctgattattatgatgaggtaaaaaataaaccgtttaatattgatccgggatattacattttcttaccggtatattttggaagcgtctttatttattcgaagggtaaaaatatggtagaacttggatctggaaactcttttcaaataccagatgatatgcgaagtgcgtgtaacaaagtattagacagcgataacggaatagactttctgagatttgttttgttaaacaatagatggataatggaagatgctatatcaaaatatcagtctccagttaatatatttaaactagctagtgagtacggattaaacatacccaaatatttagaaattgaaatagaggaagacacattatttgacgacgagttatactctattatagaacgctctttcgatgataaatttccaaaaatatccatatcgtatattaagttgggagaacttagacggcaagttgtagactttttcaaattctcgttcatgtatattgagtccatcaaggtagatcgtataggagataatatttttattcctagcgttataacaaaatcaggaaaaaagatattagtaaaagatgtagaccatttaatacgatccaaggttagagaacatacatttgtaaaagtaaaaaagaaaaacacattttccattttatacgactatgatggaaacggaacagaaactagaggagaagtaataaaacgaattatagacactataggacgagactattatgttaacggaaagtatttctctaaggttggtagtgcaggcttaaagcaattgactaataaattagatattaatgagtgcgcaactgtcgatgagttagttgatgagattaataaatccggaactgtaaaacgaaaaataaaaaaccaatcagcatttgatttaagcagagaatgtttgggatatccagaagcggattttataacgttagttaataacatgcggttcaaaatagaaaattgtaaggttgtaaatttcaatattgaaaatactaattgtttaaataacccgagtattgaaactatatatggaaactttaaccagttcgtctcaatctttaatatcgtcaccgatgtcaaaaaaagattattcgagtgaaataatatgcgcctttgatataggtgcaaaaaatcctgccagaactgttttagaagtcaaggataactccgttagggtattggatatatcaaaattagactggagttctgattgggaaaggcgcatagctaaagatttgtcacaatatgaatacactacagttcttctagaacgtcagcctagaaggtcgccgtacgtcaaatttatctattttattaaaggctttttatatcatacatcggctgccaaagttatttgcgtctcgcctgtcatgtctggtaattcatatagagatcgaaaaaagagatcggtcgaagcatttcttgattggatggacacattcggattgcgagactccgttccggatagacgcaaattagacgatgtagcggatagtttcaatttggctatgagatacgtattagataaatggaatactaattatacaccttataataggtgtaaatctagaaattacataaaaaaaatgtaataacgttagtaacgccattatggataatctatttacctttctacatgaaatagaagatagatatgccagaactatttttaactttcatctaataagttgcgatgaaataggagatatatatggtcttatgaaagaacgcatttcctcagaggatatgtttgataatatagtgtataataaagatatacatcatgccattaagaaactagtgtattgcgacatccaacttactaaacacattattaatcagaatacgtatccggtatttaacgattcttcacaagtgaaatgttgtcattatttcgacataaactcagataatagcaatattagctctcgtacagtagagatatttgagagggaaaagtcatctcttgtatcatatattaaaactaccaataagaagagaaaggtcaattacggcgaaataaagaaaactgttcatggaggcactaatgcaaattacttttccggtaaaaagtctgacgagtatctgagtactacagttagatccaacattaatcaaccttggatcaaaaccatctctaagaggatgagagttgatatcattaatcactctatagtaacgcgtggaaaaagctctatattacaaactatagaaattatttttactaatagaacatgtgtgaaaatattcaaggattctactatgcacattattctatccaaggacaaggatgaaaaggggtgtatacacatgattgacaaattattctatgtctattataatttatttctgttgttcgaggatatcatccaaaacgagtactttaaagaagtagctaatgttgtaaaccacgtacttacggctacggcattagatgagaaattattcctaattaagaaaatggctgaacacgatgtttatggagttagcaatttcaaaatagggatgtttaacctgacatttattaagtcgttggatcataccgttttcccctctctgttagatgaggatagcaaaataaagttttttaaggggaaaaagctcaatattgtagcattacgatctctggaggattgtataaattacgtgactaaatccgagaatatgatagaaatgatgaaggaaagatcgactattttaaatagcatagatatagaaacggaatcggtagatcgtctaaaagaattgcttctaaaatgaaaaaaaacactgattcagaaatggatcaacgactcggatataagtttttggtgcctgatcctaaagccggagttttttatagaccgttacatttccaatatgtatcgtattctaattttatattgcatcgattgcatgaaatcttgaccgtcaagcggccactcttatcgtttaagaataatacagaacgaattatgatagaaattagcaatgttaaagtgactcctccagattactcacctataatcgcgagtattaaaggtaagagttatgacgcattagccacgttcactgtaaatatctttaaagaggtaatgaccaaagagggtatatccatcactaaaataagtagttatgagggaaaagattctcatttgataaaaattccgctactaataggatacgggaataaaaatccacttgatacagccaagtatcttgttcctaatgtcataggtggagtctttatcaataaacaatctgtcgaaaaagtaggaattaatctagtagaaaagattacaacatggccaaaatttagggttgttaagccaaactcattcactttctcgttttcctccgtatcccctcctaatgtattaccgacaagatatcgccattacaagatatctctggatatatcacaattggaagcgtcgaatatatcatcgacaaagacatttataacggtcaatattgttttgctgtctcaatatttatctagagtgagtctagaattcattagacgtagcttatcatacgatatgcctccagaagttgtctatctagtaaacgcgataatagatagtgctaaacgaattactgaatctattactgactttaatattgatacatacattaatgacctggtggaagctgaacacattaaacaaaaatctcagttaacgatcaacgagttcaaatatgaaatgctgcataactttttacctcatatgaactatacacccgatcaactaaagggattttatatgatatctttactaagaaagtttctctactgtatctaccacacttctagatatccagatagagattcgatggtttgtcatcgtatactaacatacggcaaatattttgagacgttggcacatgatgaattagagaattacataggcaacatccgaaacgatatcatgaacaatcacaagaacagaggcacttacgcggtaaacattcatgtactaacaactcctggacttaatcatgcattttctagtctattgagtggaaagttcaaaaagtcagacggtagttatcgaacacatcctcactattcatggatgcagaatatttctattcctaggagtgttggattttatccggatcaagtaaagatttcaaagatgttttctgtcagaaaataccatccaagtcaatatctttacttttgttcatcagacgttccggaaagaggtcctcaggtaggtttagtatctcaattgtctgtcttgagttccattacaaatatactaacgtctgagtatttggatttggaaaagaaaatttgtgagtatatcagatcatattataaagatgatataagttactttgaaacaggatttccaatcactatagaaaatgctctagtcgcatctcttaatccaaatatgatatgtgattttgtaactgactttagacgtagaaaacggatgggattcttcggtaacttggaggtaggtattactttagttagggatcacatgaatgaaattcgcattaatattggagcgggaagattagtcagaccattcttggttgtggataacggagagctcatgatggatgtgtgtccggagttagaaagcagattagacgacatgacattctctgacattcagaaagagtttccgcatgtcatcgaaatggtagatatagaacaatttacttttagtaacgtatgtgaatcggttcaaaaatttagaatgatgtcaaaggatgaaagaaagcaatacgatttatgtgactttcctgccgaatttagagatggatatgtggcatcttcattagtgggaatcaatcacaattctggacccagagctattcttggatgtgctcaagctaaacaagctatctcttgtctgagctcggatatacgaaataaaatagacaatggaattcatttgatgtatccagagaggccaatcgtgattagtaaggctttagaaacttcaaagattgcggctaattgcttcggccaacatgttactatagcattaatgtcgtacaaaggtatcaatcaagaggatggaattatcatcaaaaaacaatttattcagagaggcggtctcgatattgttacagccaagaaacatcaagtagaaattccattggaaaactttaataacaaagaaagagataggtctaacgcctattcaaaattagaaagtaatggattagttagactgaatgctttcttggaatccggagacgctatggcacgaaatatctcatcaagaactcttgaagatgattttgctagagataatcagattagcttcgatgtttccgagaaatataccgatatgtacaaatctcgcgttgaacgagtacaagtagaacttactgacaaagttaaggtacgagtattaaccatgaaagaaagaagacccattctaggagacaaatttaccactagaacgagtcaaaagggaacagtcgcgtatgtcgcggatgaaacggaacttccatacgacgaaaatggtatcacaccagatgtcattattaattctacatccatcttctctagaaaaactatatctatgttgatagaggttattttaacagccgcatattctgctaagccgtacaacaataagggagaaaaccgacctgtctgttttcctagtagtaacgaaacatccatcgatacatatatgcaattcgctaaacaatgttatgagcattcaaatccgaaattgtctgatgaagaattatcggataaaatcttttgtgaaaagattctctatgatcctgaaacggataagccttatgcatccaaagtattttttggaccaatttattacttgcgtctgagacatttaactcaggacaaggcaaccgttagatgtagaggtaaaaagacgaagctcattagacaggcgaatgagggacgaaaacgtggaggaggtatcaagttcggagaaatggagagagactgtttaatagcgcatggtgcagccaatactattacagaagttttgaaagattcggaagaagattatcaagatgtgtatgtttgtgaaaattgtggagacatagcagcacaaatcaagggtattaatacatgtcttagatgttcaaaacttaatctctctcctctcttaacaaaaattgataccacacacgtatctaaagtatttcttactcaaatgaacgccagaggcgtaaaagtcaaattagatttcgaacgaagacctccttcgttttataaaccattagataaagttgatctcaaaccgtcttttctggtctaatattgtttagtagatacttatcaacatcatcaagattatcaagattatcaagattatcaagataagctaattcactaaacacattatcgatttcggtatcgttactcgcagaataaagttcgttatgatcctgatattcggaaatctgtggagtttcaggttttggtggatgtgtaacagctacttgagataccgaagtctgatattcagaaagctgtggatgttctggttcggcatccaccgatggtgttacaccactactaattggttcagtaacgtctgtggacgatggaggcaccacttctacaggttctggttctttatcctcagtcatcaacggagctacttcaatgcgaggaaatgtataatttggtaatggtttctcatgtggatctgaagaagaggtaagatatctactagaaagataccgatcacgttctagttctcttttgtagaacttaactttttctttctcagcatctagttgatattccaacctcttcacgttactacgttcagatttcaattcacgttcgcatgggttacctccgcagtttttacgagcgatttcacgttcagccttcatgcgtctctccctctctctatcgagtttatcagagcagtctttctgaaggcgatcgaactccataaatttctccaacgctttgattgtttccatagatttccgaagttcagcttttaggactgtgattctttttctttcgaattcacagctggatgtacaaccgtttccattaccgccatctctaagtttcttttctagatcggcaacatttcatccccatgccttttacattcctcgagtctactgtcgtcgaaatatcgttccagctccttttcgacatcaataactttagcacgttgtctctcaagctctcttttgtagttatctgattccctggcacgtttaagatcttcatgcaattgagtcagctcttaacacaatctcttgcttcttcgtcatagtacgcgcaatcactgtgagatccattgttaccacgtctacactcggcgagctcgcgtttaagagattcaatttcccgtttgtattggtccatgtttccattgctaccaccattagatttacaggctgctagttgtcgttcgagatcagaaatacgggttttcttggaattgatttcgtcgatgtacttggcatcgaaacacttattaagttctttttccaattctacgattttatttctttcgcgagtcaattccctcctgtagtaactatctgttttgtcagattcacgctctctacgtagactttcttgcaagttactaatttgttccctagcacgtccgagtttagttttatatgctgaatagagttctgattcatcctttgagcagatctctagcgatcgtttaagattcctgattctagtctttagcctatttacctcctcagaagatgttccgttaccgttgcgtttacactcgttaagctgtctatcaagatccatgattctatctctaagacgttgcatctctctttccatatcagcattgctttcattattacgtctgcagtcactcaactgtctttcaatatctgagattctatctctaagacgtcgcatctctctctgtttcggcattggtttcattattacgtctacagtcgttcaactgtctttcaagatctgatattctagattggagtctgctaatctctgtagcattttcacggcattcactcagttgtctttcaagatctgaaattttagattggagtctgctaatctctgtaagatttcctcctccgctctcgatgcagtcggtcaacttattctctagttctctaatacgcgaacgcagtgcatcaacttcttgcgtgtcttcctggttgcgtgtacattcatcgagtctagattcgagatctctaacgcgtcgtcgttcttcctcaagttctctgcgtactacagaaagcgtgtccctatcttgttgatatttagcaatttctgattctagagtactgattttgcttacgtagttactaatatttgtcttggccttatcaagatcctccttgtatttgtcgcattccttgatatccctacgaagtctggacagttcccattcgacattacgacgtttatcgatttcagctcggagatcgtcatcgcgttgttttagccacatacgactgagttcaagttctcgttgacaagatccatctacttttccattcctaatagtatccagttccttttctagttctgaacgcatttctcgttccctatcaagcgattctctcaattctcggatagtcttcttatcaatttctaataaatctgaaccatcatctgtcccattttgaatatccctgtgttctttgatctcttttgtaagtcggtcgattctttcggttttataaacagaatccctttccaaagtcctaatcttactgagtttatcactaagttctgcattcaattcggtgagttttctcttggcttcttccaactctgttttaaactctccactatttccgcattcttcctcgcatttatctaaccattcaattagtttattaataactagttggtaatcagcgattcctatagccgttcttgtaattgtgggaacataattaggatcttctaatggattgtatggcttgatagcatcatctttatcattattagggggatggacaaccttaattggttggtcctcatctcctccagtagcgtgtggttcttcaatagccgtgttagtaataggcttaggcaaatgcttgtcgtacgcgggcacttcctcatccatcaagtatttataatcgggttctacgtctgaatattcttttctaagagacgcaacttctggagttagtagaagaactctgtttctatatctatcaacgctggaatcaatactcaagttaaggatagcgaatacctcatcgtcatcatccgtatcctctgaaacgccatcatatgacatttcatgaagtctaacgtattgataaacagaatcagatttagtattaaacagatccttaacctttttagtaaatgcatatgtatattttagatctccagatttcataatatggtcgcatgccttaaatgtcagtgcttccataatatagtctggaacactaattggtgatgaaaaagataccggaccatatgctacgttgataaataactctgagccactaactagataatgattaatgttaaggaagaggaaatattcagtgtataggtatgtcttggcgtcatatcttgtactaaacacgctaaacagtttgttaatgtgatcaatttccaatagattaattagagcagcaggaataccaacaaacatattaccacatccgtattttctatgaatatcacatatcatgttaaaaaatcttgatagaagagcgaatatctcgtctgacttaatgagtcgtagttcagcagcaacataagtcataactgtaaatagaacatactttcctgtagtgttgattctagactccacatcaacaccattattaaaaatagttttatatacatctttaatctgctctccgttaatcgtcgaacgttctagtatacggaaacactttgatttcttatctgtagttaatgacttagtgatatcacgaagaatattacgaattacatttcttgtttttcttgagagacctgattcagaactcaactcatcgttccatagtttttttacctcagtggcgaaatctttggagtgcttggtacatttttcaataaggttcgtgacctccatttattataaaaaaattttattcaaaacttaactacaatcgggtaattataaaatcgtagatctcccatgtggtggaatactaccatctatcgcatgtggatggacagtaggtaatggccatgggaacagtaatgtttgcatatttatctttcttgccagtattactgcatattgtcccaatgtttcgatgtgatgttctaacctatcaactgccgctgtatcacaacaatagtgtccgatgaaattaagattatgatccaatgtgtttaatatatgattatcaagtcttatacgatccgcgtcttttttgacaggatcaggttcttctacaggaagaagtttcggcctcttatgatattcatgtctgggaaacggtggtctagggtgaggctccggtatcggagtgggttttggattataatcatcatcgtctatgacatcatcttcgacttcgatatttattttgctatcttgatgatgtcctgtatcagttgcattttcagcactcgactgaatattagcgcattcattgtttattattaccatatttctaaacccaaaatgtatatgttgaacatcagtactatcgttgatgagtcttatagcatgaattcgcttatcgttatcgggtttagcttctgtcaccttagcaattccttttttattaaactctacataatcatatccatttctattgtttgttctaatataaacgagtatagcatcattgctaaatttttcaatagtatcgaaaacagaatatcctaaaccatataatatatattcaggaacactcaaactaaatgtccaggattctcctaaatacgtaaactttaatagtgcgaaatcattcaaaaatctaccacttatagatagatagtacataaatgcgtatagtagtctacctatctctttattatgaaaaccggcattacgatcatatatgtcgtgatatacctgtgatccgtttacgttaaaccataaatacatgggtgatcctataaacatgaatttatttctaattctcagagctatagttaattgaccgtgtaatatttgcttacatgcatacttgatacgctcattaataagatttttatcattgctcgttatctcagaatcgtatatataaggagtaccatcgtgattcttaccagatattatacaaaatactatatataaaatatattgaccaacgttagtaatcatataaatgtttaacgttttaaattttgtattcaatgatccattatcatacgctagcatggtcttatgatattcattctttaaaatataatattgtgttagccattgcattggggctcctaatggagattttttattctcatccattttaggataggctttcataaagtccctaataacttcgtgaataatgtttctatgttttctactgatgcatgtatttgcttcgatttttttatcccatgtttcatctatcatagatttaaacgcagtaatgctcgcaacattaacatcttgaaccgttggtacaattccgttccataaatttataatgttcgccatttatataactcattttttgaatatacttttaattaacaaaagagttaagttactcatatggacgccgtccagtctgaacatcaatctttttagccagagatatcatagccgctcttagagtttcagcgtgattttccaacctaaatagaacttcatcgttgcgtttacaacacttttctatttgttcaaactttgttgttacattagtaatctttttttccaaattagttagccgttgtttgagagtttcctcattgtcgtcttcatcggctttaacaattgcttcgcgtttagcctctggctttttagcagcctttgtagaaaaaaattcagttgctggaattgcaagatcgtcatctccggggaaaagagttccgtccatttaaagtacagattttagaaactgacactctgcgttatttatatttggtacaacacatggattataaatattgatgttaataacatcagaaaatgtaaagtctatacattgttgcatcgtgttaaattttctaatggatctagtattattgggtccaacttctgcctgaaatccaaatatggaagcggatacaaaaccgtttcctggataaaccacacatctccacttttgctttacatcagaaattgtgtcattgacatcttgaactctcctatctaatgccggtgttccacctatagattttgaatattcgaatgctgcatgagtagcattaaattccttaatattgccataattttcatatattgagtaaccctggataaaaagtaaacacaccgcagccgtcgctaccacaataaaaaaaattgatagagagttcatttataatctattagaagctgacaaaatttttttacacgcatcagacaatgctttaataaatagttcaacatctacttttgtcatatcgaaccgatggtatgattctaacctagaattacatccgaaaaagttgactatgttcatagtcattaagtcattaacaaacaacattccagactctggattataagacgatactgtttcgtcacaattacctaccttaatcatgtgattatgaatattggctattagagcaccttctaagaaatctataatatctttgaaacacgatttaaaatcaaaccacgaatatacttctacgaagaaagttagtttacccataggagaaataactataaatggagatctaaatacaaaatccggatctatgatagttttaacattattatattctctattaaatacctccacatctaaaaatgttaattttgaaactatgtcttcgtttattaccgtacctgaactaaacgctataagctctattgtttgagaactctttaaacgatattcttgaaatacatgtaacaaagtttcctttaactcggtcggtttatctaccatagttacagaatttgtatccttatctataatataataatcaaaatcgtataaagttatataattatcgcgttcagattgtgatcttttcaaatagactaaaaaccccatttctctagtaagtatcttatgtatatgtttgtaaaatatcttcatggtgggaatatgctctaccgcagttagccattcctcattgacagcggtagatgtattagacaaaactattccaatgtttaacaagggccattttacgagattattaaatccttgtttgataaatgtagccaatgagggttcgagttcaacgacgattgaattctcttcccgcggatgctgcatgatgaacgacgggatgttgttcgattgatttggaattctttttcgactttttgtttatattaaatattttaaaatttatagctgatagcaattcatgtactacggataatgtagacgcgtattgcgcatcgatatctttattattagataaatttatcaataaatgtgagaagtttgcctcgttaaggtcttccatttaaatattatataaacatttgtgtttgtatcttattcgtcttttatggaatagttttttactagtaaagctgcaattacacactttgtccgtaaaacataaatataaacaccagcttttatcaatcgttccaaaaagtcgacggcggacatttttaacatggcatctattttaaatacacttaggtttttggaaaaaacatcattttataattgtaacgattcaataactaaagaaaagattaagattaaacataagggaatgtcatttgtattttataagccaaagcattctaccgttgttaaatacttgtctggaggaggtatatatcatgatgatttggttgtattggggaaggtaacaattaatgatctaaagatgatgctattttacatggatttatcatatcatggagtgacaagtagtggagcaatttacaaattgggatcgtctatcgatagactttctctaaataggactattgttacaaaagttaataattatgatgatacattttttgacgacgatgattgatcgctattgcacaattttgtttttttactttctaatatagcgtttagattctttttcatgtgcgaatattgatttactaaaatatcgatgtttaacttttgttctatgacgtccttatcagcggtatcggtacatatacgtaattcaccttcacaaaatacggagtcttcgataataatagccaatcgattattggatctagcggtctgtatcatattcaacatgtttaatatatcctttcgtttcccctttacaggcatcgatcgtagcatattttccgcgtctgagatggaaatgttaaaactacaaaaatgcgtaatgttagcccgtcctaatattggtacgtgtctataagtttggcatagtagaataatagacgtgtttaaatgccttccaaagtttaagaattctattagagtattgcattttgatagtttatcgcctacatcatcaaaaataagtaaaaagtgtgctgattttttatgattttgtgcgacagcaatacatttttctatgttacttttagttcgtatcagattatattctagagattcctgactactaacgaaattaatatgatttggccaaatgtatccatcataatctggattataaacgggtgtaaacaagaatatatgtttatattttttaactagtgtagaaaacagagatagtaaatagatagtttttccagatccagatcctcccgttaaaaccattctaaacggcatttttaataaattttctcttgaaaattgtttttcttggaaacaattcataattatatttacagttactaaattaatttgataataaatcaaaatatggaaaactaaggtcgttagtagggaggagaacaaagaaggcatatcgtgatataaataacatttattatcatgatgacaccagaaaacgacgaagagcagacatctgtgttctccgctactgtttacggagacaaaattcagggaaagaataaacgcaaacgcgtgattggtctatgtattagaatatctatggttatttcactactatctatgattaccatgtccgcgtttctcatagtgcgcctaaatcaatgcatgtctgctaacgaggctgctattactgacgccgctgttgccgttgctgctgcatcatctactcatagaaaggttgcgtctagcactacgcaatatgatcacaaagaaagctgtaatggtttatattaccagggttcttgttatatattacattcagactaccagttattctcggatgctaaagcaaattgcactgcggaatcatcaacactacccaataaatccgatgtcttgattacctggctcattgattatgttgaggatacatggggatctgatggtaatccaattacaaaaactacatccgattatcaagattctgatatatcacaagaagttagaaagtatttttgtgttaaaacaatgaactaatatttatttttgtacattaataaatgaaatcgcttaatagacaaactgtaagtaggtttaagaagttgtcggtgccggccgctataatgatgatactctcaaccattattagtggcataggaacatttctgcattacaaagaagaactgatgcctagtgcttgcgccaatggatggatacaatacgataaacattgttatctagataccaacattaaaatgtctacagataatgcggtttatcagtgtcgtaaattacgagctagattgcctagacctgatactagacatctgagagtattgtttagtattttttataaagattattgggtaagtttaaaaaagaccaataataaatggttagatattaataatgataaagatatagatattagtaaattaacaaattttaaacaactaaacagtacgacggatgctgaagcgtgttatatatacaagtctggaaaactggttgaaacagtatgtaaaagtactcaatctgtactatgtgttaaaaaattctacaagtgacaacaaaaaatgaattaataataagtcgttaacgtacgccgccatggacgccgcgtttgttattactccaatgggtgttgactataacagatacattgtatgatgatctcgatatctcaatcatggactttataggaccatacattataggtaacataaaaactgtccaaatagatgtacgggatataaaatattccgacatgcaaaaatgctactttagctataagggtaaaatagttcctcaggattctaatgatttggctagattcaacatttatagcatttgtgccgcatacagatcaaaaaataccatcatcatagcatgcgactatgatatcatgttagatatagaagataaacatcagccattttatctattcccatctattgatgtttttaacgctacaatcatagaagcgtataacctgtatacagctggagattatcatctaatcatcaatccttcagataatctgaaaatgaaattgtcgtttaattcttcattctgcatatcagacggcaatggatggatcataattgatgggaaatgcaatagtaattttttatcataaaagttgtaaagtaaataataaaacaataaatattgaactagtagtacgtatattgagcaatcagaaatgatgctggtacctcttatcacggtgaccgtagttgcgggaacaatattagtatgttatatattatatatttgtaggaaaaagatacgtactgtctataatgacaataaaattatcatgacaaaattaaaaaagataaagagttctaattccagcaaatctagtaaatcaactgatagcgaatcagactgggaggatcactgtagtgctatggaacaaaacaatgacgtagataatatttctaggaatgagatattggacgatgatagcttcgctggtagtttaatatgggataacgaatccaatgttatggcgcctagcacagaacacatttacgatagtgttgctggaagcacgctgctaataaataatgatcgtaatgaacagactatttatcagaacactacagtagtaattaatgaaacggagactgttaaagtacttaatgaagataccaaacagaatcctaactattcatccaatcctttcgtaaattataataaaaccagtatttgtagcaagtcaaatccgtttattacagaacttaacaataaatttagtgagaataatccgtttagacgagcacatagcgatgattatcttaataagcaagaacaagatcatgaacacgatgatatagaatcatcggtcgtatcattggtgtgattagtttcctttttataaaattgaagtaatatttagtattattgctgccgtcacgttgtacaaatggagatattccctgtattcggcatttctaaaattagcaattttattgctaataatgactgtagatattatatagatacagaacatcaaaaaattatatctgatgagatcaatagacagatggatgaaacggtacttcttaccaacatcttaagcgtagaagttgtaaatgacaatgagatgtaccatcttattcctcatagattatcgacgattatactctgtattagttctgtcggaggatgtgttatctctatagataatgacgtcaatggcaaaaatattctaacctttcccattgatcatgctgtaatcatatccccactgagtaaatgtgtcgtagttagcaagggccctacaaccatactggttgctaaagcggatatacccagcaaacgattggtaacatcgtttacaaacgacatactgtatgtaaacaatctatcactgattaattatttgccgttgtctgtattcattattagacgagtcaccgactatttggatagacacatatgcgatcagatatttgctaataataagtggtattcccttataaccatcgacgataagcaatatcctattccatcaaattgtataggtatgtcttctgccaagtacataaattctagcatcgagcaagatactttaatacatgtttgtaacctcgagcatccattcgacttagtatacaaaaaaatgcagtcgtacaattctgtacctatcaaggaacaaatattgtacggtagaattgataatataaatatgagcattagtatttctgtggattaatagatttctagtatggggatcattaatcatctctaatctctaaatacctcataaaacgaaaaaaaagctattatcaaatactgtacggaatagattcattctcttctctttttatgaaactctgttgtatatctactgataaaactggaagcaaaaaatctgataaaaagaataagatcaagatcaaggattatatggaacacgattattataaaataacaatagttcctggttcctcttccacgtctactagctcgtggtattatacacatgcctagtaatagtctctttgcgttgatggaaagcagactagaaataacaggctaaaatgttcagacaccataatagttcccaacccagataataacagagtaccatcaacacattcctttaaactcaatcccaaacccaaaaccgttaaaatgtatccggccaattgatagtagataatgaggtgtacagcgcatgataatttacacagtaaccaaaatgaaaatactttagtaattataagaaatatagatggtaacgtcatcatcaacaatccaataatatgccggagagtaaacattgacggataaaacaaaaatgctccgcataactctatcatggcaataacacaaccaaatacttgtaagattcctaaattagtagaaaatacaacggatatcgatgtataagtgatctcgagaaataataagaataaagtaatgcccgtaaagataaacatcaacattgtttggtaatcattaaaccaattagtatgacgttgaactaatttcacagtaaattttattccagtattatccccgcatgtataagtacctggtaagatatctttatattccataatcaatgagacatcactatctgataacgaatgaagtctagcactagtatgccatttacttaatattgtcgtcttggaagttttattataagttaaaatatcatggttatccaatttccatctaatatactttgtcggattatctatagtacacggaataatgatggtatcattacatgctgtatactctatggtctttgtagttgttataacaaccaacgtatagaggtatatcaacgatattctaactcttgacattttttatttatttaaaatgatacctttgttatttattttattctattttgctaacggtattgaatggcataagtttgaaacgagtgaagaaataatttctacttacttattagacgacgtattatacacgggtgttaatggggcggtatacacattttcaaataataaactaaacaaaactggtttaactaataataattatataacaacatctataaaagtagaggatgcggataaggatacattagtatgcggaaccaataacggaaatcccaaatgttggaaaatagacggttcagacgacccaaaacatagaggtagaggatacgctccttatcaaaatagcaaagtaacgataatcagtcacaacggatgtgtactatctgacataaacatatcaaaagaaggaattaaacgatggagaagatttgacggaccatgtggttatgatttattcacggcggataacgtaattccaaaagatggtttacgaggagcattcgtcgataaagacggtacttatgacaaagtttacattcttttcactgatactatcggctcaaagagaattgttaaaattccgtatatagcacaaatgtgcctaaacgacgaaggtggtccatcatcgttgtctagtcatagatggtcgacgtttctcaaagtcgaattagaatgtgatatcgacggaagaagttatagataaattattcattctaaaactataaaaacagataatgatacgatactatatgtattcttcgatagtccgcattatgtacctattctatgaataccattaaacaatctttttctacgtcaaaattggaaggatatacaaagcaattgccgtctccagctcctggtatatgtctaccagctggaaaagttgttccacataccacgtttgaagtcatagaaaaatataatgtactagatgatattataaagcctttatctaaccaacctatcttcgaaggaccgtctggtgttaaatggttcgatataaaggagaaggaaaatgaacatcgggaatatagaatatacttcataaaagaaaattctatatattcgttcgatacaaaatctaaacaaactcgtagctcgcaagtcgatgcgcgactattttcagtaatggtaacttcgaaaccgttatttatagcagatatagggataggagtaggaatgccacaaatgaaaaaaatacttaaaatgtaatcttaatcgagtacaccacacgacaatgaacaaacataagacagattatgctggttatgcttgctgcgtaatatgcggtctaattgttggaattatttttacagcgacactattaaaagttgtagaacgtaaattagttcatacaccatcaatagataaaacgataaaagatgcatatattagagaagattgtcctactgactggataagctataataataaatgtatccatttatctactgatcgaaaaaacctgggaggaaggacgtaatgcatgcaaagctctaaatccaaattcggatctaattaagatagagactccaaacgagttaagttttttaagaagccttagacgaggctattgggtaggagaatccgaaatattaaaccagacaaccccatataattttatagctaaaaatgccacgaagaatggaactaaaaaacggaaatatatttgtagtacaacgaatactcccaaactgcattcgtgttacactatataacaattacactacatttttatcataacactacttcggttagatgttttagaaaaaaataaatatcgccgtaccgttcttgtttttataaaaataacaattaacaattatcaaattttttctttaatattttacgtggttgaccattcttggtggtaaaataatctcttagtgttggaatggaatgctgtttaatgtttccgcactcatcgtatattttgacgtatgcagtcacatcgtttacgcaatagtcagactgtagttctatcatgcttcctacatcagaaggaggaacagttttaaagtctcttggttttaatctattgccattagttttcatgaaatcctttgttttatccacttcacattttaaataaatgtccactatacattcttctgttaattttactagatcgtcatgggtcatagaatttataggttccgtagtccatggatccaaactagcaaacttcgcgtatacggtatcgcgattagtgtatacaccaactgtatgaaaattaagaaaacagtttaataaatcaacagaaatatttaatcctccgtttgatacagatgcgccatatttatggatttcggattcacacgttgtttgtctgaggtgttcgtctagtgttgcttctacgtaaacttcgattcccatatattctttattgtcagaatcgcataccgatttatcatcatacactgtttgaaaactaaatggtatacacatcaaaataataaataataacgagtacattctgcaatattgttatcgtaattggaaaattagtgttcgagtgagtcggattatgtgagtactggattgtatattttattttatattttgtaataagaataaaatgctaatgtcaagtttattccaatagatgtcttattaaaaaacatatataataaataacaatggctgaatggcataaaattatcgaggatatctcaaaaaataataagttcgaggatgccgccatcgttgattacaagactacaaagaatgttctagctgctattcctaacagaacatttgccaagattaatccgggtgaaattattcctctcatcactaatcgtaatattctaaaacctcttattggtcagaaatattgtattgtatatactaactctctaatggatgagaacacgtatgctatggagttgcttactgggtacgcccctgtatctccgatcgttatagcgagaactcataccgcacttatatttttgatgggtaagccaacaacatccagacgtgatgtgtatagaacgtgtagagatcacgctacccgtgtacgcgcaactggtaattaaaataaaaagtaatattcatatgtagtgtcaattttaaatgatgatgatgaaatggataatatccatattgacgatgtcaataatgccggtattggcatacagctcatcgatttttagatttcattcagaggatgtggaattatgttatgggcatttgtattttgataggatctataatgtagtaaatataaaatataatccgcatattccatatagatataattttattaatcgcacgttaaccgtagatgaactagacgataatgtcttttttacacatggttattttttaaaacacaaatatggttcacttaatcctagtttgattgtctcattatcaggaaacttaaaatataatgatatacaatgctcagtaaatgtatcgtgtctcattaaaaatttggcaacgagtacatctactatattaacatctaaacataagacttattctctacatcggtccacgtgtattactataataggatacgattctattatatggtataaagatataaatgacaagtataatgacatctatgattttactgcaatatgtatgctaatagcgtctacattgatagtgaccatatacgtgtttaaaaaaataaaaatgaactcttaattatgctatgctattagaaatggataaaatcaaaattacggttgattcaaaaattggtaatgttgttaccatatcgtataacttggaaaagataactattgatgttacacctaaaaagaaaaaagaaaaggatgtattattagcgcaatcagttgctgtcgaagaggcaaaagatgtcaaggtagaagaaaaaaatattatcgatattgaagatgacgatgatatggatgtagaaagcgcataatacgatctataaaaataagtatataataaatactttttatttacggtactcttgtagtggtgataccctactcaattatttttttaaaaaaatacttattctgattcttctagccatttccgtgttcgttcgaatgccacatcgacgttaaagataggggagtagttgaaatctagttctgcattgttggtacgcacctcaaatgtagtgttggatatcttcaacgtatagttgttgagtagtgatggttttctaaatagaattctcttcatatcattcttgcacgcgtacatttttagcatccatcttggaattctagatccttgttctattcccaatggtttcatcaatagaagattaaacatatcgtacgaacacgatggagagtaatcgtagcaaaagtaagcatttcctttaatcttagatcccggatactggatatattttgcagccaacacgtgcatccatgcagcatttcctacatatacccggctatgcaccgcgtcatcatcgactgtacgatacataatgttaccgtgttgcttacattgctcgtaaaagactttcgtcaatttgtctccttctccgtaaattccagtgggtcttaggcaacaagtatacaattttgctccattcatgattacggaattattggctttcataaccagttgctcggccatacgtttactttttgcgtatacatgtcctggtgatatatcataaagggtatgctcatggccgatgaatggatcaccgtgtttattgggtcctattgcttccatgctactagtatagatcaaatacttgattcctaggtccacacaagctgccaatatagtctgtgttccataatagtttactttcatgatttcattatcggtgtattttccaaatacatccactagagcagccgtatgaataatcagatttaccccatctagcgcttctctcaccttatcaaagtcgtttatatcacattgtatatagtttataaccttaactttcgaggttattggttgtggatcttctacaatatctatgactctgatttcttgaacatcatctgcactaattaacagttttactatatacctgcctagaaatccggcaccaccagtaaccgcgtacacggccattgctgccactcataatatcagactacttattctattttactaaataatggctgtttgtataatagaccacgataatatcagaggagttatttactttgaaccagtccatggaaaagataaagttttaggatcagttattggattaaaatccggaacgtatagtttgataattcatcgttacggagatattagtcaaggatgtgattccataggcagtccagaaatatttatcggtaacatctttgtaaacagatatggtgtagcatatgtttatttagatacagatgtaaatatatttacaattattggaaaggcgttatctatttcaaaaaatgatcagagattagcgtgtggagttattggtatttcttacataaatgaaaagataatacattttcttacaattaacgagaatggcgtttgatatatcagttaatgcgtctaaaacaataaatgcattagtttacttttctactcagcaaaataaattagtcatacgtaatgaagttaatgatacacactacactgtcgaatttgatagggacaaagtagttgacacgtttatttcatataatagacataatgacaccatagagataagaggggtgcttccagaggaaactaatattggttgcgcggttaatacgccggttagtatgacttacttgtataataagtatagttttaaactgattttagcagaatatataagacacagaaatactatatccggcaatatttattcggcattgatgacactagatgatttggctattaaacagtatggagacattgatctattatttaatgagaaacttaaagtagactccgattcgggactatttgactttgtcaactttgtaaaggatatgatatgttgtgattctagaatagtagtagctctatctagtctagtatctaaacattgggaattgacaaataaaaagtataggtgtatggcattagccgaacatatatctgatagtattccaatatctgagctatctagactacgatacaatctatgtaagtatctacgcggacacactgagagcatagaggatgaatttgattattttgaagacgatgattcgtctacatgttctgccgtaaccgacagggaaacggatgtataattttttttatagcgtgaaggatatgataaaaaatataattgttgtatttatcccattccaatcaccttatatgattctgtaaaaaaattatactgtaacacaataaaggagtcttatagatgtatagaggtcagatactggtttgataaactgtttattccacataagtatgtttgactttatggttagacccgcatactttaacaaatcactgaaaattggagttaggtattgacctctcagaatcagttgccgttctggaacattaaatgtattttttatgatatactccaacgcatttatgtgggcatacaacaagtcattactaatggagtattccaagagttttagttgtctagtatttaacaagagaagagatttcaacagactgtttatgaactcgaacgccgcctcattgtcgcttatattgatgatgtcgaattctcccaatatcatcactgatgagtagctcatcttgttatcgggatccaagttttctaaagatgtcattaaaccctcgatcatgaatggatttatcatcatcgtttttatgttggacatgagcttagtccgtttgtccacatctatagacgacgatttctgaattatttcatatatccctctctttaactccaggaacttgtcaggatggtctactttaatatgttctcgtctaagagatgaaaatctttggatggttgcacgcgacttttctttaaaggatgacgttgcccaagatcctctcttaaatgaatccatcttatccttggacaagatggacagtctattttccttagatggtttaatatttttgttacccatgatctataaaggtagacctaatcgtctcggatgaccatatatttattttcagttttattatacgcataaattgtaaaaaatatgttaggtttacaaaaatgtctcgtggggcattaatcgtttttgaaggattggacaaatctggaaaaacaacacaatgtatgaacatcatggaatctataccggcaaacacgataaaatatcttaactttcctcagagatccactgtcactggaaagatgatagatgactatctaactcgtaaaaaaacctataatgatcatatagttaatctattattttgtgcaaatagatgggagtttgcatcttttatacaagaacaactagaacagggaattactttaatagttgatagatacgcattttctggagtagcgtatgccgccgctaaaggcgcgtcaatgactctcagtaagagttatgaatctggattgcctaaacccgacttagttatattcttggaatctggtagcaaagaaattaatagaaacgtcggcgaggaaatttatgaagatgttacattccaacaaaaggtattacaagaatataaaaaaatgattgaagaaggagatattcattggcaaattatttcttctgaattcgaggaagatgtaaagaaggagttgattaagaatatagttatagaggctatacacacggttactggaccagtggggcaactgtggatgtaatagtgaaattacattttttataaatagatgttagtacagtgttataaatggatgaagcatattactctggcaacttggaatcagtactcggatacgtgtccgatatgcataccgaactcgcatcaatatctcaattagttattgccaagatagaaactatagataatgatatattaaacaaggacattgtaaattttatcatgtgtagatcaaacttggataatccatttatctctttcctagatactgtatatactattatagatcaagagatctatcagaccgaattgattaattcattagacgacaatgaaattatcgattgtatagttaacaagtttatgagcttttataaggataacctagaaaatatagtagatgctatcattactctaaaatatataatgaataatccagattttaaaactacgtatgccgaagtactcggttccagaatagccgatatagatattaaacaagtgatacgtaagaatatactacaattgtctaatgatatccgcgaacgatatttgtgaaaaatattaaaaaaaaatactttttttattaaatgacgtcgcttcgcgaatttagaaaattatgctgtgatatatatcacgcatcaggatataaagaaaaatctaaattaattagagactttataacagatagggatgataaatatttgatcattaagctattgcttcccggattagacgatagaatttataacatgaacgataaacaaattataaaattatatagtataatatttaaacaatctcaggaagatatgctacaagatttaggatacggatatataggagacactattaggactttcttcaaagagaacacagaaatccgtccacgagataaaagcattttaactttagaagaagtggatagttttttaactacgttatcatccgtaactaaagaatcgcatcaaataaaattattgactgatgtagcatctgtttgtacatgtaatgatttaaaatgtgtagtcatgcttattgataaagatctaaaaattaaagcgggccctcggtacgtacttaacgctattagtcctcatgcctatgatgtgtttagaaaatctaataacttgaaagagataatagaaaatgcatctaaacaaaatctagactctatatctatttctgttatgactccaattaatcccatgttagcggaatcgtgtgattctgtcaataaggcgtttaaaaaatttccatcaggaatgtttgcggaagtcaaatacgatggtgaaagagtacaagttcataaaaataataacgagtttgccttctttagtagaaacatgaaaccagtactctctcataaagtggattatctcaaagaatacataccgaaagcatttaaaaaagctacgtctatcgtattggattctgaaattgttcttgtagacgaacataatgtaccgctaccgtttggaagtttaggaatacacaaaaagaaagaatataaaaactctaacatgtgtttgttcgtgtttgactgtttgtactttgatggattcgatatgacggacattccattgtacgaacgaagatcttttctcaaagatgttatggttgaaatacccaatagaatagtattctcagagttgacgaatattagtaacgagtctcagttaactgacgtattggatgatgcactaacgagaaaattagaaggattggtcttaaaagatattaatggagtatacgaaccgggaaagagaagatggttaaaaataaagcgagactatttgaacgagggttccatggcagattctgccgatttagtagtactaggtgcctactatggtaaaggagcaaagggtggtatcatggcagtctttctaatgggttgttacgacgatgaatccggtaaatggaagacggttaccaagtgttcaggacacgatgataatacgttaagggagttgcaagaccaattaaagatgattaaaattaacaaggatcccaaaaaaattccagagtggttagtagttaataaaatctatattcccgattttgtagtagaggatccgaaacaatctcagatatgggaaatttcaggagcagagtttacatcttccaagtcccataccgcaaatggaatatccattagatttcctagatttactaggataagagaggataaaacgtggaaagaatctactcatctaaacgatttagtaaacttgactaaatcttaatagttacatacaaactgaaaattaaaataacaccatttagttggtggtcgccatggatggtgttattgtatactgtctaaacgcgttagtaaaacatggcgaggaaataaatcatataaaaaatgatttcatgattaaaccatgttgtgaaagagtttgtgaaaaagtcaagaacgttcacattggcggacaatctaaaaacaatacagtgattgcagatttgccatatatggataatgcggtatccgatgtatgcaattcactgtataaaaagaatgtatcaagaatatccagatttgctaatttgataaagatagatgacgatgacaagactcctactggtgtatataattattttaaacctaaagatgttattcctgttatcatatctataggaaaggataaagatgtctgtgaactattaatctcatcagacatatcgtgtgcatgcgtggagttaaattcatatcacgtagccattcttcccatgaatgtttccttttttaccaaaggaaatgcctcgttgattattctcctgtttgatttctctatcgatgcagcacctctcttaagaagtgtaaccgataataatgttattatatctagacaccagcgtctacatgacgagcttccgagttccaattggttcaagttttacataagtataaagtccgactattgttctatattatatatggttgttgatggatctgtgatgcatgcgatagctgataatagaactcacgcaattattagcaaaaatatattagacaatactacaattaacgatgagtgtagatgctgttattttgaaccacagattaggattcttgatagagatgagatgctcaatggatcatcgtgtgatatgaacagacattgtattatgatgaatttacctgatgtaggcgaatttggatctagtatgttggggaaatatgaacctgacatgattaagattgctctttcggtggctggtaatttaataagaaatcgagactacattcccgggagacgaggctatagctactacgtttacggtatagcctctagataatttttttaagcacgaaataaaaaacataattttaaaccaatctatttcatactattttgtgtgatcaccatggacataaagatagatattagtatttctggtgataaatttacggtgactactaggagggaaaatgaagaaagaaaaaaatatctacctctccaaaaagaaaaaactactgatgttatcaaacctgattatcttgagtacgatgacttgttagatagagatgagatgtttactattctagaggaatattttatgtacagaggtctattaggcctcagaataaaatatggacgactctttaacgaaattaaaaaattcgacaatgatgcggaagaacaattcggtactatagaagaactcaagcagaaacttagattaaattctgaagagggagcagataactttatagattatataaaggtacaaaaacaggatatcgtcaaacttactgtatacgattgcatatctatgataggattgtgtgcatgcgtggtagatgtttggagaaatgagaaactgttttctagatggaaatattgtttacgagcgattaaactgtttattaatgatcacatgcttgataagataaaatctatactgcagaatagactagtatatgtggaaatgtcatagaaagttaatgagagcaaaaatatataaggttgtattccatatttgttattttttctgtaatagttaaaaaaatacattcgatggtctatctatcagattattatgtgttataaggtactttttctcataataaactagagtatgagtaagatagtgtttttcaaaacatataaatctaaaattgatggatgagatatacagctattaatttcgaaaatatataaatctaaaattgatggataagatatacagctattaatttcgaaaatatattttaatctgataactttaaacatggatttttgatggtggtttaacgttttaaaaaaagattttgttattgtagtatatgataatattaaaagatggatataaagaatttgctgactgcatgtactattttttacattactacattggctacggcagatatacctactccgccaccaacgggtcatgtgacaagggagaatatcttgataagaggcataatcaatgttgtaatcggtgtccacctggagaatttgccaaggttagatgtaatggtaacgataacacaaaatgtgaacgctgcccacctcatacatataccacaatccccaattattctaatggatgtcatcaatgtagaaaatgcccaaccggatcatttgataaggtaaagtgtaccggaacacagaacagtaaatgttcgtgtcttcctggttggtattgcgctactgattcttcacagactgaagattgttgaaattgtgtaccaaaaaggagatgtccatgcggatactttggtggaatagatgaacaaggaaatcctatttgtaaatcgtgctgtattggtgaatattgcaactacctacgtaattatagacttgatccattttctccatgcaaactatctaaatgtaattaattatgattttgatgataatgttaccatacattatatcgctacttggttagtgtattattcagtatgaagacctattaataattacttatcttttgacgatcttgttataattataatataaaaacttatggcatagtaactcataattgctgacgcgataaattcgtaataatctgttttgttcaaatttttataaggaatctacaggcataaaaataaaaatataatttataatatactcttacagcgcgccatcatgaatagcagcagtaaattaattgctgttattaatggatttagaaatagtggacgattttgtgatattaatatagttattaatgatgaaaggataaacgctcacagactcatcctatctggagcctccgaatatttttccattctgttttccaataattttatcgattctaatgaatacgaagttaatctaagtcatttagattatcaaagtgttaacgatttgatcgattacatttatgggatacctttgagcctaactaacgataacgtgaaatatattctttcaaccgctgattttttacaaattggatctgccattactgagtgcgaaaaatacatacttaaaaatctttgttctagaaactgtatcgatttctacatatacgctgataaatataataacaagaaaatagaatcagcgtcgtttaacacaatattacgaaatattttgagactcatcaacgatgaaaactttaaatacttaacagaggaatcaatgataaaaattttaagcgatgatatgttaaatataaaaaatgaggattttgcaccactaattctcattaaatggttagagagtactcaacaatcatgcaccgtcgagttacttagatgcctcagaatatcattgctttccccacaagttataaaatcactttatagtcatcaactggttagttcaatctacgaatgtataacattcttaaacaatatagcattcttggatgaatcatttcctagataccatagcatcgagttgatatctatcggtataagtaattcgcatgataagatttccataaactgctacaatcataaaaaaaatacatgggaaatgatatcttcacgtagatataggtgtagtttcgcagtggccgtcctggataatattatctatatgatgggtggatatgatcagtccccgtatagaagttcaaaggttatagcgtacaatacatgtacaaattcttggatatatgatataccagagctaaaatatcctcgttctaattgtgggggactggctgatgacgaatacatttattgtataggcggcatacgcgatcaggattcatcgttgacatctagtattgatagatggaagccatcaaaaccatattggcagaagtatgctaaaatgcgcgaaccaaaatgtgatatgggggttgcgatgttaaacggattaatatatgtcatgggtggaatcgttaaaggtgacacgtgtaccgacgcactagagagtttatcagaagatggatggatgaagcatcaacgtcttccaataaaaatgtccaatatgtcgacgattgttcatgatggcaagatttatatatctggaggttacaacaatagtagtgtagttaatgtaatatcgaatctagtccttagctataatccgatatatgatgaatggaccaaattatcatcattaaacattcctagaattaatcccgctctatggtcagcgcataataaattatatgtaggaggaggaatatctgatgatgttcgaactaatacatctgaaacatacgataaagaaaaagattgttggacattggataatggtcacgtgttaccacgcaattatataatgtataaatgcgaaccgattaaacataaatatccattggaaaaaacacagtacacgaatgattttctaaagtatttggaaagttttataggtagttgatagaacaaaatacataattttgtaaaaataaatcactttttatactaatatgacacgattaccaatacttttgttactaatatcattagtatacgctacaccttttcctcagacatctaaaaaaataggtgatgatgcaactctatcatgtaatcgaaataatacaaatgactacgttgttatgagtgcttggtataaggtaccaaaaattgaaaataaatacaaaggttcttgagggttgtgttaaattgaaagcgagaaataatcataaatactgcagaccatgaagaagtccggggtgttgtttcttcttggtataatattgttggtcctcattggcgttcaaggaactcccgtcgtgcggaagggacgatgctcttgcatcagtaccaaccaaggtacaatacatctccagtcactcaaggacctcaaacagtttgcgccgagcccatcttgcgaaaagattgagatcatcgcaaccctcaagaatggagtccagacttgtttgaatccggactctgccgatgtgaaggaattgattaaaaaatgggagaaacaagtgtcccaaaaaaaaaagcaaaagaatggtaaaaaacaccaaaaaaagaaggtcttgaaggttcggaaatctcagcggtctagacaaaaaaagacaacttgattaattaatttttattagtagaatttcattttgtttttttctatgctataaataccatgtgccaccagcaattggtgatctcatggttttctttggtgtttctcgcgagcccgttggtcgccatttgggagttgaagaaggacgtctacgtggtcgagttggattggtaccccgacgctccgggagaaatggttgtcctgacttgcgatacgccagaagaggacggtattacgtggacattggatcagagttcagaggtcttgggttctggaaagacactcacaatacaggtgaaggagttcggtgacgctggacagtatacttgccataagggaggtgaagttctgagtcattcattgcttctcttgcacaaaaaagaggacggtatctggtctacagatattcttaaggaccaaaaggagccgaagaacaagacgttcctccgatgcgaggctaagaattattcaggccgatttacttgctggtggctcaccactatcagcacagatttgacgttctctgtcaaatcctctagagggtctagtgacccacagggagtgacttgcggtgcagcaacccttagtgcggagcgcgtgcgcggtgacaataaggaatacgagtattctgtagagtgtcaagaggactccgcctgccctgcggcagaggaatcactgcccatagaggttatggtagatgctgtccataagcttaagtacgaaaattacacctcctctttctttatacgcgatattataaagcctgaccctcctaagaatctccagctgaagccgcttaaaaactcccggcaagtcgaagtgtcctgggaatacccagacacctggtcaacaccgcattcatacttttccctcacgttttgcgttcaagttcaaggcaagagtaaacgggaaaaaaaggatcgagtattcactgacaaaaccagtgcgactgtaatttgcagaaagaacgccagcatatcagtccgggcgcaggataggtactactccagtagctggtcagaatgggcctctgtaccttgctctggagggggtggtggaggttccaggaacctccctgtagcaacacctgaccccggtatgtttccgtgtctgcaccactcacagaacctgcttagggcggtatccaacatgcttcagaaggctcgacaaaccttggaattttacccatgcacctctgaggaaattgatcatgaagacataactaaagataagacatccactgtggaggcttgtctcccgctcgaacttaccaaaaatgaatcttgcttgaattcccgggagacatcttttatcaccaacgggtcatgtcttgcatctaggaagactagtttcatgatggcattgtgcttgtctagcatctatgaggacctgaagatgtaccaggtcgaatttaagactatgaacgcgaaacttctcatggaccctaaacggcagatatttcttgatcagaatatgctggcggttattgacgagcttatgcaggcccttaatttcaactccgaaactgtaccccaaaagagcagtctcgaggaaccggacttctacaaaacgaaaattaagttgtgcattctcttgcacgcatttagaattagagccgtgactatagaccgcgtgatgagctatctgaacgcttcttgattaattaagagctcatgcggatctttatgatacgtacaatgataatgatacagtaccaccaactactgtaggcggtagtacaacctctattagcaattataaaaccaaggactttgtagaaatatttggtattaccgcattaattatattgtcggccgtggcaatattctgtattacatattatatatataataaacgttcacgtaaatacaaaacagagaacaaagtctagatttttgacttacataaatgtctgggatagtaaaatctatcatattgagcggaccatctggttcaggaaagacagccatagccaaaagactatgggaatatatttggatttgtggtgtcccataccactagatttcctcgtcctatggaacgagaaggtgtcgattaccattacgttaacagagaggccatctggaagggaatagccgccggaaactttctagaacatactgagtttttaggaaatatttacggaacttctaaaactgctgtgaatacagcggctattaataatcgtatttgtgtgatggatctaaacatcgatggcgttagaagtcttaaaaatacgtacctaatgccttactcggtgtatataagacctacctctcttaaaatggttgagaccaagcttcgttgtagaaacactgaagcggatgatgagattcatcgtcgtgtgatgttggcaaaaactgacatggatgaggcaggtgaagccggtctattcgacactattatcattgaagatgatgtgaatttagcatatagtaagttaattcagatactacaggaccgtattagaatgtattttaacactaattagagacttaagacttaaaacttgataattaataatataactcgtttttatatgtggctatttcaacgtctaatgtattagttaaatattaaaacttaccacgtaaaacttaaaatttaaaatgatatttcattgacagatagatcacacattatgaactttcaaggacttgtgttaactgacaattgcaaaaatcaatgggtcgttggaccattaataggaaaaggtggattcggtagtatttatactactaatgacaataattatgtagtaaaaatagagcccaaagctaacggatcattatttaccgaacaggcattttatactagagtacttaaaccatccgttatcgaagaatggaaaaaatctcacaatataaagcacgtaggtcttatcacgtgcaaggcatttggtctatacaaatccattaatgtggaatatcgattcttggtaattaatagattaggtgcagatctagatgcggtgatcagagccaataataatagattaccaaaaaggtcggtgatgttgatcggaatcgaaatcttaaataccatacaatttatgcacgagcaaggatattctcacggagatattaaagcgagtaatatagtcttggatcaaatagataagaataaattatatctagtggattacggattggtttctaaattcatgtctaatggcgaacatgttccatttataagaaatccaaataaaatggataacggtactctagaatttacacctatagattcgcataaaggatacgttgtatctagacgtggagatctagaaacacttggatattgtatgattagatggttgggaggtatcttgccatggactaagatatctgaaacaaagaattgtgcattagtaagtgccacaaaacagaaatatgttaacaatactgcgactttgttaatgaccagtttgcaatatgcacctagagaattgctgcaatatattaccatggtaaactctttgacatattttgaggaacccaattacgacgagtttcggcacatattaatgcagggtgtatattattaagtgtggtgtttggtcgatgtaaaatttttgtcgataaaaattaaaaaataacttaatttattattgatctcgtgtgtacaaccgaaatcatggcgatgttttacgcacacgctctcggtgggtacgacgagaatcttcatgcctttcctggtacctgcagcggccgctcgagagctcctggtaaaagttaaacttggggagaatgatacagaaaatctttcttctactatatcggcggcaccatcgaggtaaccacctctcaagaagaccgcgtgaataatgtactcatgaaacgtttggaaactatacgccatatgtggtctgttgtatatgatcattttgatattgtgaatggtaaagaatgctgttatgtgcatacgcattcatctaatcaaaatcctataccgagtactgtaaaaacaaatttgtacatgaagactatgggatcatgcattcaaatggattccatggaagctctagagtatcttagcgaactgaaggaatcaggtggatggagtcccagaccagaaatgcaggaatttgaatatccagatggagtggaagacactgaatcaattgagagattggtagaggagttcttcaatagatcagaacttcaggctggtaaattagtcaaatttggtaattctattaattgttaaacatacatctgtttcagctaagcaactaagaacacgtatacggcagcagcttccttttatactctcatcttttaccaacacaaagggtggatatttgttcattggagttgataataatacacacaaagtatttggattcacggtgggttacgactacctcagactgatagagaatgatatagaaaagcatatcaaaagactttgtgttgtgcatttctgtgagaagaaagaggacatcaagtacacgtgtcgattcatcaaggtatataaacctggggatgaggctacctcgacatacgtgtgcgctatcaaagtggaaagatgctgttgtgctgtgtttgcagattggccagaatcatggtatatggatactaatggtatcaagaagtattctccagatgaatgggtgtcacatataaaattttaattaatgtaactatagagaacaaataataggttgtaatatcatatagacaataactaacaattaattagtaactgttatctcttttttaactaaccaactaactatatacctattaatacatcgtaattatagttcttaacatctattaatcattgattcgcttctttaattttttataaactaacattgttaattgaaaagggataacatgttacagaatataaattatatatggatttttttaaaaaggaaatacttgactggagtgtatatttatctcttcattatatagcacgcgtgtgttccaattcttccacatcccatataatacaggattataatctcgttcgaacatacgagaaagtggataaaacaatagttgattttttatctaggttgccaaatttattccatattttagaatatggggaaaatattctacatatttattctatggatgatgctaatacgaatattataattttttttctagatagagtattaaatattaataagaacgggtcatttatacacaatctcaggttatcatcatccattaatataaaagaatatgtatatcaattagttaataatgatcatccagataataggataagactaatgcttgaaaatggacgtagaacaagacattttttgtcctatatatcagatacagttaatatctatatatgtattttaataaatcatggattttatatagatgcagaagacagttacggttgtacattattacatagatgtatatatcactataagaaatcagaatcagaatcatacaatgaattaattaagatattgttaaataatggatccgatgtagataaaaaagatacgtacggaaacacaccttttatcctattatgtaaacacgatatcaacaacgtggaattgtttgagatatgtttagagaatgctaatatagactctgtagactttaatagatatacacctcttcattatgtctcatgtcgtaataaatatgattttgtaaagttattaatttctaaaggagcaaatgttaatgcgcgtaataaattcggaactactccattttattgtggaattatacacggtatctcgcttataaaactatatttggaatcagacacagagttagaaatagataatgaacatatagttcgtcatttaataatttttgatgctgttgaatctttagattatctattatccagaggagttattgatattaactatcgtactatatacaacgaaacatctatttacgacgctgtcagttataatgcgtataatacgttggtctatctattaaacagaaatggtgattttgagacgattactactagtggatgtacatgtatttcggaagcagtcgcaaacaacaacaaaataataatggaagtactattgtctaaacgaccatctttgaaaattatgatacagtctatgatagcaattactaaaaataaacaacataatgcagatttattgaaaatgtgtataaaatatactgcgtgtatgaccgattatgatactcttatagatgtacagtcgctacagcaatataaatggtatattttaaaatgtttcgatgaaatagatatcatgaagagatgttatataaaaaataaaactgtattccaattagttttttgtatcaaagacattaatactttaatgagatatggtaaacatccttctttcgtgaagtgcactagtctcgacgtatacggaagtcgtgtacgtaatatcatagcatctattagatatcgtcagagattaattagtctattatccaagaagctggatgcgggagataaatggtcgtgttttcctaacgaaataaaatataaaatattggaaaactttaacgataacgaactatccacatatctaaaaatcttataaacactattaaaatataaaatctaagtaggataaaatcacactacatcattgtttccttttagtgctcgacagtgtatactatttttaacactcataaataaaaatgaaaacgatttccgttgttacgttgttatgcgtactacctgctgttgtttattcaacatgtactgtacccactatgaataacgctaaattaacgtctaccgaaacatcgtttaatgataaacagaaagttacatttacatgtgatcagggatatcattctttggatccaaatgctgtctgcgaaacagataaatggaaatacgaaaatccatgcaagaaaatgtgcacagtttctgattatgtctctgaattatatgataagccattatacgaagtgaattccaccatgacactaagttgcaacggcgaaacaaaatattttcgttgcgaagaaaaaaatggaaatacttcttggaatgatactgttacgtgtcctaatgcggaatgtcaacctcttcaattagaacacggatcgtgtcaaccagttaaagaaaaatactcatttggggaatatatgactatcaactgtgatgttggatatgaggttattggtgcttcgtacataagttgtacagctaattcttggaatgttattccatcatgtcaacaaaaatgtgatataccgtctctatctaatggattaatttccggatctacattttctatcggtggcgttatacatcttagttgtaaaagtggttttatactaacgggatctccatcatccacatgtatcgacggtaaatggaatcccatactcccaacatgtgtacgatctaacgaaaaatttgatccagtggatgatggtcccgacgatgagacagatttgagcaaactctcgaaagacgttgtacaatatgaacaagaaatagaatcgttagaagcaacttatcatataatcatagtggcgttaacaattatgggcgtcatatttttaatctccgttatagtattagtttgttcctgtgacaaaaataatgaccaatataagttccataaattgctaccgtaaatataaatccgttaaaataattaataatttaataacaaacaagtatcaaaagattaaagacttatagctagaatcaattgagatgtcttcttcagtggatgttgatatctacgatgccgttagagcatttttactcaggcactattataacaagagatttattgtgtatggaagaagtaacgccatattacataatatatacaggctatttacaagatgcgccgttataccgttcgatgatatagtacgtactatgccaaatgaatcacgtgttaaacaatgggtgatggatacacttaatggtataatgatgaatgaacgcgatgtttctgtaagcgttggcaccggaatactattcatggaaatgtttttcgattacaataaaaatagtatcaacaatcaactaatgtatgatataattaatagcgtatctataattctagctaatgagagatatagaagcgcttttaacgacgatggtatatacatccgtagaaatatgattaacaagttgtacggatacgcatctctaactactattggcacgatcgctggaggtgtttgttattatctgttgatgcatctagttagtttgtataaataattatttcaatatactagttaaaattttaagattttaaatgtataaaaaactaataacgtttttatttgtaataggtgcattagcatcctattcgaataatgagtacactccgtttaataaactgagtgtaaaactctatatagatggagtagataatatagaaaattcatatactgatgataataatgaattggtgttaaattttaaagagtacacaatttctattattacagagtcatgcgacgtcggatttgattccatagatatagatgttataaacgactataaaattattgatatgtataccattgactcgtctactattcaacgcagaggtcacacgtgtagaatatctaccaaattatcatgccattatgataagtacccttatattcacaaatatgatggtgatgagcaacaatattctattactgcagagggaaaatgctataaaggaataaaatatgaaataagtatgatcaacgatgatactctattgagaaaacatactcttaaaattggatctacttatatatttgatcgtcatggacatagtaatacatattattcaaaatatgatttttaaaaatttaaaatatattatcacttcagtgacagtagtcaaataacaaacaacaccatgagatatattataattctcgcagttttgttcattaatagtatacacgctaaaataactagttataagtttgaatccgtcaattttgattccaaaattgaatggactggggatggtctatacaatatatcccttaaaaattatggcatcaagacgtggcaaacaatgtatacaaatgtaccagaaggaacatacgacatatccgcatttccaaagaatgatttcgtatctttctgggttaaatttgaacaaggcgattataaagtggaagagtattgtacgggactatgcgtcgaagtaaaaattggaccaccgactgtaacattgactgaatacgacgaccatatcaatttgtacatcgagcatccgtatgctactagaggtagcaaaaagattcctatttacaaacgcggtgacatgtgtgatatctacttgttgtatacggctaacttcacattcggagattctaaagaaccagtaccatatgatatcgatgactacgattgcacgtctacaggttgcagcatagactttgtcacaacagaaaaagtgtgcgtgacagcacagggagccacagaagggtttctcgaaaaaattactccatggagttcgaaagtatgtctgacacctaaaaagagtgtatatacatgcgcaattagatccaaagaagatgttcccaatttcaaggacaaaatggccagagttatcaagagaaaatttaataaacagtctcaatcttatttaactaaatttctcggtagcacatcaaatgatgttaccacttttcttagcatgcttaacttgactaaatattcataactaatttttattaatgatacaaaaacgaaataaaactgcatattatacactggttaacgcccttataggctctaaccattttcaagatgaggtccctgattatagtccttctgttcccctctatcatctactccatgtctattagacgatgtgagaagactgaagaggaaacatggggattgaaaatagggttgtgtataattgccaaagatttctatcccgaaagaactgattgcagtgttcatctcccaactgcaagtgaaggattgataactgaaggcaatggattcagggatatacgaaacaccgataaattataaaaaaagcaatgtgtccgctgtttccgttaataatactattttcgtaactggcggattattcataaataactctaatagcacgatcgtggttaacaatatggaaaaacttgacatttataaagacaaacaatggtcgattatagaaatgcctatggctagggtatatcacggcatcgactcgacatttggaatgttatattttgccggaggtctatccgttaccgaacaatatggtaatttagagaaaaacaacgagatatcttgttacaatcctagaacgaataagtggtttgatatttcatatactatttataagatatccatatcatcattgtgtaaactaaataacgtcttctatgtatttagtaaggacattggatatgtggaaaagtatgatggtgcatggaagttagtacatgatcgtctccccgctataaaggcattatcaacttctccttattgattgaaaatgaaaatataaatagtttttatgtatagcagtattaccctatagttttattgcttactactaacatggatacagatgttacaaatgtagaagatatcataaatgaaatagatagagagaaagaagaaatactaaaaaatgtagaaattgaaaataataaaaacattaacaagaatcatccaagtggatatattagagaagcactcgttattaatacaagtagtaatagtgattccattgataaagaagttatagaatgtatcagtcacgatgtaggaatatagatcatatctactaatttttataatcgatacaaaacataaaaaacaactcgttattacatagcaggcatggaatccttcaagtattgttttgataacgatggcaagaaatggattatcggaaatactttatattctggtaattcaatactatataaggtcagaaaaaatttcactagttcgttctacaattacgtaatgaaaatagatcacaaatcacacaagccattgttgtctgaaatacgattctatatatctgtattggatcctttgactatcgacaactggacacgggaacgtggtataaagtatttggctattccagatctgtatggaattggagaaaccgatgattatatgttcttcgttataaagaattcgggaagagtattcgccccaaaggatactgaatcagtcttcgaagcatgcgtcactatgataaacacgttagagtttatacactctcgaggatttacccatggaaaaatagaaccgaggaatatactgattagaaataaacgtctttcactaattgactattctagaactaacaaactatacaagagtggaaactcacatatagattacaacgaggacatgataacttcaggaaatatcaattatatgtgtgtagacaatcatcttggagcaacagtttcaaaacgaggagatttagaaatgttgggatattgcatgatagaatggttcggtggcaaacttccatggaaaaacgaaagtagtataaaagtaataaaacaaaaaaaagaatataaaaaatttatagctactttctttgaggactgttttcctgaaggaaatgaacctctggaattagttagatatatagaattagtatacacgttagattattctcaaactcctaattatgacagactacgtaaactgtttatacaagattgaaattatattctttttttatagagtgtggtagtgttacggatatctaatattaatattagactatctctatcgcgctacacgaccaatatcgattactatggatatcttcagggaaatcgcatcttctatgaaaggagagaatgtattcatttctccagcgtcaatctcgtcagtattgacaatactgtattatggagctaatggatccactgctgaacagctatcaaaatatgtagaaacggaggagaacacggataaggttagcgctcagaatatctcattcaaatccatgaataaagtatatgggcgatattctgccgtgtttaaagattcctttttgagaaaaattggcgataagtttcaaactgttgacttcactgattgtcgcactatagatgcaatcaacaagtgtgtagatatctttactgaggggaaaatcaatccactattggatgaaccattgtctcctgatacctgtctcctagcaattagtgccgtatactttaaagcaaaatggttgatgccattcgaaaaggaatttaccagtgattatcccttttacgtatctccgacggaaatggtagatgtaagtatgatgtctatgtacggcaaggcatttaatcacgcatctgtaaaggaatcattcggcaacttttcaatcatagaactgccatatgttggagatactagtatgatggtcattcttccagacaagattgatggattagaatccatagaacaaaatctaacagatacaaattttaagaaatggtgtaactctctggaagctacgtttatcgatgttcacattcccaagtttaaggtaacaggttcgtataatcttgtggatactctagtaaagtcaggactgacagaggtgttcggttcaactggagattatagcaatatgtgtaattcagatgtgagtgtcgacgctatgattcacaaaacgtatatagatgtcaatgaagagtatacagaagcagctgcagcaacttgtgcactggtgtcagactgtgcatcaacaattacaaatgagttctgtgtagatcatccgttcatctatgtgattaggcatgttgatggaaaaattcttttcgttggtagatattgctctccgacaactaattgttaaccattttttttaaaaaaatagaaaaaacatgtggtattagtgcaggtcgttgttcttccaattgcaattggtaagatgacggccaactttagtacccacgtcttttcaccacagcactgtggatgtgacagactgaccagtattgatgacgtcagacaatgtttgactgaatatatttattggtcgtcctatgcataccgcaacaggcaatgcgctggacagttgtattccacactcctctcttttagagatgatgcggaatcagtgttcatcgacattcgcgagctggtaaaaaatatgccgtgggatgatgtcaaagattgtacagaaatcatccgttgttatataccggatgagcaaaaaaccatcagagagatttcggccatcatcggactttgtgcatatgctgctacttactggggaggtgaagaccatcccactagtaacagtctgaacgcattgtttgtgatgcttgagatgctcaattacgtggattataacatcatattccggcgtatgaattgatgagttgtacatcttgacattttctttcttctcttctccctttcttctcttctcccttcctccctcttctccctttcccagaaacaaacttttttacccactataaaataaaatgagtatactacctattatatttcttcctatatttttttattcttcattcgttcagacttttaacgcgcctgaatgtatcgacaaagggcaatattttgcatcattcatggagttagaaaacgagccagtaatcttaccatgtcctcaaataaatacgctatcatccggatataatatattagatattttatgggaaaaacgaggagcggataatgatagaattataccgatagataatggtagcaatatgctaattctgaacccgacacaatcagactctggtatttatatatgcattaccacgaacgaaacctactgtgacatgatgtcgttaaatttgacaatcgtgtctgtctcagaatcaaatatagatcttatctcgtatccacaaatagtaaatgagagatctactggcgaaatggtatgtcccaatattaatgcatttattgctagtaacgtaaacgcagatattatatggagcggacatcgacgccttagaaataagagacttaaacaacggacacctggaattattaccatagaagatgttagaaaaaatgatgctggttattatacatgtgttttagaatatatatacagaggtaaaacatataacgtaaccagaattgtaaaattagaggtacgggataaaataataccttctactatgcaattaccagatggcattgtaacttcaataggtagtaatttgactattgcgtgtagagtatcgttgagacctcccacaacggatgcagacgtcttttggataagtaatggtatgtattacgaagaagatgatggggacggagacggtagaataagtgtagcaaataaaatctatatgaccgataagagacgtgttattacatcccggttaaacattaatcctgtcaaggaagaagatgctacaacgtttacgtgtatggcgtttactattcctagcatcagcaaaacagttactgttagtataacgtgaatgtatgttgttacatttccatgtcaattgagtttataagaatttttatacattatcttccaacaaacaattgacgaacgtattgctatgattaactcccacgatactatgcatattattaatcattaacttgcagactatacctagtgctattttgacatactcatgttcttgtgtaattgcggtatctatattattaaagtacgtaaatctagctatagttttattatttaattttagataatataccgtctccttatttttaaaaattgccacatcctttattaaatcatgaatgggaatttctatgtcatcgttagtatattgtgaacaacaagagcagatatctataggaaagggtggaatgcgatacattgatctatgtagttttaaaacacacgcgaactttgaagaatttatataaatcattccatcgatacatccttctatgttgacatgtatatatccaggaattcttttattaatgtcaggaaatgtataaactaaaacattgcccgaaagcggtgcctctatctgcgttatatccgttcttaacttacaaaatgtaaccaatacctttgcatgacttgttttgttcggcaacgttagtttaaacttgacgaatggattaattacaatagcatgatccgcgcatctattaagtttttttactttaacgcccttgtatgtttttacagagactttatctaaatttctagtacttgtatgtgttataaatataacgggatatagaactgaatcacctaccttagatacccaattacattttatcagatccagataataaacaaattttgtcgccctaactaattctatattgttatatattttacaattggttatgatatcatgtaataacttggagtctaacgcgcatcgtcgtacgtttatacaattgtgatttagtgtagtatatctacacatgtatttttccgcactatagtattctggactagtgataaaactatcgttatatctgtcttcaatgaactcatcgagatattgctctctgtcatattcatacacctgcataaactttctagacatcttacaatccgtgttattttaggatcatatttacatatttacgggtatatcaaagatgttagattagttaatgggaatcgtctataataatgaatattaaacaattatatgaggacttttaccacaaagcatcataaaaatgagtcgtcgtctgatttatgttttaaatatcaaccgcaaatcaactcataaaatacaagagaatgaaatatatacatattttagtcattgcaatatagaccatacttctacagaacttgattttgtagttaaaaactatgatctaaacagacgacaacatgtaactgggtatactgcactacactgctatttgtataataattactttacaaacgatgtactgaagatattattaaatcatgacgtaaatgtaacgatgaaaaccagtagcggacgtatgcctgtttatatattgcttactagatgttgcaatatttcacatgatgtagtgatagatatgatagacaaagataaaaaccacttattacatagagactattccaacctattactagagtatataaaatctcgttacatgttattaaaggaagaggatatcgatgagaacatagtatccactttattagataagggaatcgatcctaactttaaacaagacggatatacagcgttacattattattatttgtgtctcgcacacgtttataaaccaggtgagtgtagaaaaccgataacgataaaaaaggccaagcgaattatttctttgtttatacaacatggagctaatctaaacgcgttagataattgtggtaatacaccattccatttgtatcttagtattgaaatgtgtaataatattcatatgactaaaatgctgttgacttttaatccgaatttcaaaatatgtaataatcatggattaacgcctatactatgttatataacttccgactacatacaacacgatattcttgttatgttaatacatcactatgaaacaaatgttggagaaatgccgatagatgagcgtcgtatgatcgtattcgagtttatcaaaacatattctacacgtccggcagattcgataacttatttgatgaataggtttaaaaatataaatatttatacccgctatgaaggaaagacattattacacgtagcatgtgaatataataatacacacgtaatagattatcttatacgtatcaacggagatataaatgcgttaaccgacaataacaaacacgctacacaactcattatagataacaaagaaaattccccgtataccatcgattgtttactgtatatacttagatatattgtagataagaatgtgataagatcgttggtggatcaacttccatctctacctatcttcgatataaaatcatttgagaaattcatatcctactgtatacttttagatgacacattttacgataggcacgttaagaatcgcgattctaaaacgtatcgatacgcattttcaaaatacatgtcgtttgataaatacgatggtataataactaaatgtcacgacgaaacaatgttactcaaactgtccactgttctagacactacactatatgcagttttaagatgccataattcgaaaaagttaagaagatacctcaacgagttaaaaaaatataataacgataagtcctttaaaatatattctaatattatgaatgagagataccttaatgtatattataaagatatgtacgtgtcaaaggtatatgataaactatttcctgttttcacagataaaaattgtctactaacattactaccttcagaaattatatacgaaatattatacatgctgacaattaacgatctttataatatatcgtatccacctaccaaagtatagttgtatttttctcatgcgatgtgtgtaaaaaaactgatattatataaatattttagtgccgtataataaagatgacgatgaaaatgatggtacatatatatttcgtatcattattgttattgctattccacagttacgccatagacatcgaaaatgaaatcacagaattcttcaataaaatgagagatactctaccagctaaagactctaaatggttgaatccagcatgtatgttcggaggcacaatgaatgatatagccgctctaggagagccattcagcgcaaagtgtcctcctattgaagacagtcttttatcgcacagatataaagactatgtggttaaatgggagaggctagaaaagaatagacggcgacaggtttctaataaacgtgttaaacatggtgatttatggatagccaactatacatctaaattcagtaaccgtaggtatttgtgtaccgtaactacaaagaatggtgactgtgttcagggtatagttagatctcatattaaaaaacctccttcatgcattccaaaaacatatgaactaggtactcatgataagtatggcatagacttatactgtggaattctttacgcaaaacattataataatataacttggtataaagataataaggaaattaatatcgacgacattaagtattcacaaacgggaaagaaattaattattcataatccagagttagaagatagtggaagatacaactgttacgttcattacgacgacgttagaatcaagaatgatatcgtagtatcaagatgtaaaatacttacggttataccgtcgcaagaccacaggtttaaactaatactagatccaaaaatcaacgtaacgataggagaacctgccaatataacatgcactgctgtgtcaacgtcattattgattgacgatgtactgattgaatgggaaaatccatccggatggcttataggattcgattttgatgtatactctgttttaactagtagaggcggtattaccgaggcgaccttgtactttgaaaatgttactgaagaatatataggtaatacatataaatgtcgtggacacaactattattttgaaaaaacccttacaactacagtagtattggagtaaatacacaatgcatttttatatacattactgaataattattattattatttatatcgtatttgtgctataacgcgactatctaggtatttgtatctcactgatagagaacatataaatatagactctattaaacagttgtgtaaaatatcaaatcctaatagatgtggatgtacggctttacatgagtacttttataattatagatcagtcaacggaaaatacaagtatagatacaacggttactatcaatattatttatctagcgattatgaaaattataatgaatattattatgatgattatgatagaactggtatgaacagtgagagtgataatatatcaatcaaaacagaatatgaattctatgatgaaacacaagatcaaagtacacaactagtaggttacgacattaaactcaaaaccaatgaggatgattttatggctatgatagatcagtgggtgtccatgattatatagatgaatcaattaataaagtagtatatggaagagagtctcacgtaagatggcgggatatatggcaagaacataatgatggcgtatacagtataggaaaggagtgcatagataatatatacgaagacaaccataccgtagacgaattctacaagatagacagcgtatcagatgtagatgacgcggaacacatatctccgataactaatgatgtatctacacaaacatgggaaaagaaatcagagttagatagatacatggaaatgtatcctcgtcatagatatagtaagcattctgtctttaagggattttctgacaaagttagaaaaaatgatttagacatgaatgtggtaaaagaattactttctaacggtgcatctctaacaattaaggatagcagtaataaggatccaataaccgtttattttcgaagaacgataatgaatttagaaatgattgatattattaacaaacatacaactattgatgaacgaaagtatatagtacactcctatctaaaaaattataaaaatttcgattatccatttttcaggaagttagttttgactaataaacattgtctcaacaattattataatataagcgacagcaaatatggaacaccgctacatatattggcgtctaataaaaaattaataactcctaattacatgaagttattagtgtataacggaaatgatataaacgcacgaggtgaagatacacaaatgcgaactccattacacaaatatttgtgtaaatttgtatatcataatattgaatatggtatccgatactataatgaaaagattatagacgcatttatagagttaggagccgatctaactattccaaataacgatggaatgataccagtagtttactgtatacactcaaatgcagaatatggttataacaatattactaacataaagataatacgtaaactacttaatcttagtagacgtgcgtcacataatctatttagagatcgagtcatgcacgattatataagtaatacatatattgatcttgagtgtttagatattattagatcgttggatggattcgatatcaatggttactttgaaggacgtacaccacttcattgcgctatacaacataacttcactcagattgctaagtacttattagatcgaggagctgatatagtcgtacccaacacattgattatacatcagtacatacagtaaatagcatagatatggaggaggatacaaatatttcaaataaagttataaggtacaacactgtcaataatatatggaagacattacctaacttctggactggaactataaatccaggcgtggtctcgcataaagatgatatatatgttgtatgcgacatcaaagatgaaaaaaatgttaagacttgtatatttagatataacacgaatacgtataacggatgggaattggttacgacgacagaaagcagattatcagctctgcatactattcttcatgacaataccataatgatgttacattgttatgaatcgtatatgttacaagatacatttaatgtgtacactcgcgaatggaatcatatgtgtcatcaacattcgaatagttatatcatgtacaatatactacccatctactaaatataatagaataaaataaatgagtatgatcattttagataacgattgattttatcattaccgcttcattcttatattctttgcttacggaacctatatttagaaacatctactaacgattttttatgcttgcattattaatggtatgtaatatgattgattgtgtacgcaataccaatttgttaagtatgaatacggggtacaaacataaactgaaatttaacattatttatttatgatatatatcgttatcgttattgtttggtctataccatggatatctttaaagaactaatcttaaaacaccctgatgaaaatgttttgatttctccagtttctattttatctactttatctattctaaatcatggagcagctggttctacagctgaacaactatcaaaatatatagagaatatgaatgagaatacacccgatgataagaaggatgacaataatgacatggacgtagatattccgtattgtgcgacactagctaccgcaaataaaatatacggtagcgatagtatcgagttccacgcctccttcctacaaaaaataaaagacgattttcaaactgtaaactttaataatgctaaccaaacaaaggaactaatcaacgaatgggttaagacgatgacaaatggtaaaattaattccttattgactagtccgctatccattaatactcgtatgacagttgttagcgccgtccattttaaagcaatgtggaaatatccattttctaaacatcttacatatacagacaagttttatatttctaagaatatagttaccagtgttgatatgatggtgggtaccgagaataacttgcaatatgtacatattaatgaattattcggaggattctctattatcgatattccatacgagggaaactctagtatggtaattatactaccggacgacatagaaggtatatataacatagaaaaaaatataacagatgaaaaatttaaaaaatggtgtggtatgttatctactaaaagtatagacttgtatatgccaaagtttaaagtggaaatgacagaaccgtataatctggtaccgattttagaaaatttaggacttactaatatattcggatattatgcagattttagcaagatgtgtaatgaaactatcactgtagaaaaatttctacatacgacgtttatagatgttaatgaggagtatacagaagcatcggccgttacaggagtatttatgactaacttttcgatggtatatcgtacgaaggtctacataaaccatccattcatgtacatgattaaagacaacacaggacgtatactttttatagggaaatactgctatccgcaataaatataaacaaatagacttttatcacgtttatctatgtctaaatattacaaatagtaatagtataaactaaagctgataatacttaaaaaaataataatatcatttacaattaatagtataaactaaaaattaaacaaatcgttattataagtaatatcaaaatgatgatatacggattaatagcgtgtcttatattcgtgacttcatccatcgctagtccactttatattcccgttattccacccattacggaagataaatcgttcaatagtgtagaggtattagtttccttgtttagagatgaccaaaaagactatacggtaacttctcagttcaataactacactatcgataccaaagactggactatcggcgtactatccacacctgatggtttggatataccattgactaatataacttattggtcacggtttactataggtcgtgcattgttcaaatcagagtctgaggatattttccaaaagaaaatgagtattctaggtgtttctatagaatgtaagaagtcgtcgacattacttacttttttgaccgtgcgtaaaatgactcgagtatttaataaatttccagatatggcttattatcgaggagactgtttaaaagccgtttatgtaacaatgacttataaaaatactaaaactggagagactgattacacgtacctctctaatggggggttgcctgcatactatcgtaatggggtcgatggttgattattgattagtatattccttattcacacaaaaagaacatttttataaacatgaaaccactgtctaaatgtaattatgatcttgatttatagatgaagatcagcctttagaggattttaaccagtatgtttaatatgaaaaaaataaacataacatattttgagattaagcgctattgtgcttaattattttgctctataaactgaatatatagccacaattattgacgggcttgtttatgaccggcaatcatgaatttacagaaattatctctggctatatatcttactgcgacatgttcgtggtgttatgaaacatgcataagaaaaactgcgttgtatcatgacattcaattggagcatgtagaagacaataaagatagtgtagcgtcgctaccgtacaagtagtcaatcaaagagaacgtagtagattgttggctacatttaattggacagatatagctgagggtgttagaaatgagttcattaaaatatgtgatatcaacggaacatatttatataattatactattgctgttagtataattattgattccacggaagaactaccaacagttactccaattacaacaacatatgaaccttctacatataattatactatcgatgatagcactgttattactactgaagaactacaagtgactcctcatatggatctccatcgatgatacatgtattaaaatactttccgaataagtcttttaaatattgtattaattatgaaaaactatgctatgcgagtatgatgcaaagatgtttaatgatacgatactagattttatctctagcgagagatgtcgttagaatcatttatcataactacgtttaataataattcatcaacgaatatcgataacatgtgtcatttatacgttaaagtctgtccgtcttctctattgtttagactgtttgtagaatgctgtgatataaacaaactagtagaaggtacgactccgttacactgttatctaatgaatgaaggatttgaatcatctgttttaaaaaacctattaaaggagtatgtcatgaatacgtttaatgttcatgacatccattacacaaatatttaactcatgatgaagttgagaatgatatgctttctgatagtatagatagctttagctaatataaaaatatattaatccactatatattctagacttgatttaaaaccgataaactactactacgtactgtataagttgttaaaaaaaggagcagaccctaattatgtagatgatagaggtaatacttttcttcattacttctgcatctatatgtccacttatgagaaaacgtcatttaataagatgcatcgtgaaaagaaatttattaaagagttggtaaaatatgaaaccgaaagtaaataatataggaaatacacctctacataactacgtatctcaatatgatatcactctcattcctcatccacaacccattaaaaaaatggaaattaaagccctctattagcataaacggctacaggtctacctttacaatggcctctccttgtgcccagttcagaccctgtcattgccacgctactaaggactccctgaataccgtggccgacgtcagacattgtctgactgaatacatcctgtgggtttctcatagatggacccatagagaaagcgcagggtctctctacaggcttctcatctctttcagaactgatgcaacggagctctttggtggtgagttgaaggattcacttccgtgggacaatatcgacaattgcgtggagatcattaaatgtttcatcagaaatgactccatgaaaaccgccgaagaacttcgtgcaatcattggactttgtactcaatcagctatcgtctctggaagagtcttcaacgataagtatatcgacatactacttatgctgcgaaagattctgaacgagaacgactatctcaccctcttggatcatatccgcactgctaaatactaaatctccttcatgctctctcactacactttttatcatcttatgaggaatgattgccttcatcatttttcgtgaaataggaataattagcaccagaatagctatggattgcacatgtattctatgtcgtctactggatgaagatgtgacgtacaaaaaaataaaactagaaattgaaacgtgtcacaacttatcaaaacatatagatagacgaggaaacaatgcgctacattgttacgtcttcaataaatgcgatacagacattaagattgttcgactgttactctctcgcggagtcgagagactttgtagaaacaacgaaggattaactccgctaggagcatacagtaagcatagatacgtaaaatctcaaattgtgcatctactgatatccagctattcgaattcctctaacgaactcaagtcgaatataaatgatttcgatctgtattcgtatatgtcttcggataatatcgacttacgtctgctaaaatacctaattgtggataaacggatacgtccgtccaagaatacgaattatgcaatcaatggtctcggattggtggatatatacgtaacgacgcctaatccgagaccagaagtattgctatggcttcttaaatcagaatgttacagcaccggttacgtatttcgtacctgtatgtacgacagtgatatgtgtaagaactctcttcattactatatatcgtctcatagagaatctcaatctctatccaaggatgtaattaaatgtttgatcaataacaatgtttccatccatggcagagacgaaggaggatctttacccatccaatactactggtcttgctcaaccatagatatagagattgttaaattattaataaaggatgtggacacgtgtagagtatacgacgtcagccctatattagaggcggattatctaaacaagcgatttagagtaaccccatataatgtagacatggaaatcgttaatcttcttattgagagacgtcatactcttgtcgacgtaatgcgtagtattacttcttacgattccagagactataaccactacatcatcgataacattctaaagagatttagacaacaggatgaatccatcgtacaagccatgttgataaactacttacattacggcgatatggtcgttcgatgcatgttagataacggacaacaactatcctctgcacgactactttgttaataataatctcgtcgatgtaaacgtcgtaaggtttatcgtggaaaataatggacacatggctgtaaatcacgtatcgaacaatggccgtctatgtatgtacggtctgatattatcgagatttaataattgcgggtatcactgttatgaaaccatactaatagatgtatttgatatactaagcaagtacatggataatatagatatgatcgataatgagaataaaactctactatattacgcggtcgatgtcaataatatacaatttgcaaagcggttattggaatatggagcgagtgttacaacatcacgctcgataatcaatacggccatccagaaaagtagttacagaagagaaaacaaaacgaggatagttgatttattacttagctaccatcccactctagagactatgattgacgcatttaatagagatatacgctatctatatcctgaaccattattcgcctgtatcagatacgccttaatcctagatgatgattttccttctaaagtaagtatgatatctccggtcgtcataaggaactaaagcgctatagagtagacattaatagaatgaagaatgcctacatatcaggcgtctccatgtttgatatattatttaaacgaagcaaacgccacagattgagatacgcaaagaatccgacatcaaatggtacaaaaaagaactaacgtccatcattacagaaactgtaaagaacaatgagaggatcgactccatagtggacaacattaatacagacgataacttgatttcgaaattacccatggagatactttattactccattaaataatttatcatggagcgataatgtcctgtttcatttgtttccatgacatattacaaaatcgattccgtccaagatgataaaaacatttaccggcatcataaacacggagtttattttatatgtctcgcataaacattactaaaaaaatatattgttcggttttctttcacatctttaattatgaaaaagtaaatcattatgagatggacgagattgtacgcatcgttcgcgacagtatgtggtacatacctaacgtatttatggacgacggtaagaatgaaggtcacgtttctgtcaacaatgtttgtcatatgtattttacgttctttgatgtggatacatcgtctcatctgtttaagctagttattaaacactgcgatctgaataaacgaggtaactctccattacattgctatacgatgaatacacgatttaatccatctgtattaaagatattgttacaccacggcatgcgtaactttgatagcaaggatgaaaaaggacatattcctctacaccactatctgattcattcactatcaatcgataacaagatctttgatatactaacggacaccattgatgactttagtaaatcatccgatctattgctgtgttatcttagatataaattcaatgggagcttaaactattacgttctgtacaaaggatccgaccctaattgcgtcgacgaggatggactcacttctcttcattactactgtaaacacatatccacgttctacaaaagcaattattacaagttaagtcacactaagatgcgagccgagaagcgattcatctacgcgataatagattatggagcaaacattaacgcggttacacacttaccttcaacagtataccaaacatagtcctcgtgtggtgtatgctcttttatctcgaggagccgatacgaggatacgtaataatcttgattgtacacccatcatggaacgattgtgcaacaggtcatattctcataatgttactcaattggcacgaacaaaaggaagaaggacaacatctactttatctattcataaaacataatcaaggatacactctcaatatactacggtatctactagataggttcgacattcagaaagacgaatactataataccgcctttcaaaattgtaacaacaatgttgcctcatacatcggatacgacatcaaccttccgactaaagacggtattcgacttggtgtttgaaaacagaaacatcatatacaaggcggatgttgtgaatgacatcatccaccacagactgaaagtatctctacctatgattaaatcgttgttctacaagatgtcagaattctctccctacgacgattactacgtaaaaaagatactagcctactgcctattaagggacgagtcattcgcggaactacatagtaaattctgtttaaacgaggactataaaagtgtatttatgaaaaatatatcattcgataagatagattccatcatcgtgacataagtcgccttaaagagattcgaatctccgacaccgacctgtatacggtatcacagctatcttaaagccatacattcggacagacacatttcatttcccatgtacgacgatctcatagaacagtgccatctatcgatggagcataaaagtaaactcgtcgacaaagcactcaataaattagagtctaccatcggtcaatctagactatcgtatttgcctccggaaattatgcgcaatatcatctaaacagtatgttgtacggaaagaaccattacaaatattatccatgatagaaagaaaatatctatatgattggagaagtaggaaacaggaacaagacgacgattactacattattaaatcatgaagtccgtattatactcgtatatattgtttctctcatgtataataataaacggaagagatatagcaccgcatgcaccatccgatggaaagtgtaaagacaacgaatacaaacgccataatttgtgtccgggaacatacgcttccagattatgcgatagcaagactaacacacgatgtacaccctgtggttcgggtaccttcacatctcgcaataatcatttacccgcttgtctaagttgtaacggaagacgcgatcgtgtaacacgactcacaatagaatctgtgaatgctctcccggatattattgtcttctcaaaggatcatccggatgcaaggcatgtgtttcccaaacaaaatgtggaataggatacggagtatccggagacgtcatctgttctccgtgtggtctcggaacatattctcacaccgtctcttccgcagataaatgcgaacccgtacccagtaatacctttaactatatcgatgtggaaattaatctgtatcccgtcaacgacacgtcgtgtactcggacgaccactaccggtctcagtgaatccatctcaacgtcggaactaactattactatgaatcataaagactgtaatcccgtatttcgtgaggaatacttctctgtccttaataaggtagcaacttcaggtttctttacaggagaaaggtgtgcactctgaatttcgagattaaatgcaataacaaagattcttcctccaaacagttaacgaaagcaaagaatgatgacggtatcatgccgcattcggagacagtaactctagtgggcgactgtatatctagcgtcgacatctatatactatatagtaataccaatactcaagactacgaaactgatacaatctcttatcatgtgggtaatgttctcgatgtcgatagccatatgcccggtagttgcgatatacataaactgatcactaattccaaacccacccgctttttatagtaagtttttcacccataaataataaatacaataattaatttctcgtaaaagtagaaaatatattctaatttattgcatggtaaggaagtagaatcataaagaacagtactcaatcaatagcaattatgaaacaatatatcgtcctggcatgcatgtgcctgccagtcttcagcaatcatcctcatcctcatcctcgtgtacggaagaagaaaacaaacatcatatgggaatcgatgttattatcaaagtcacaaagcaagaccaaacaccgaccaatgataagatttgccaatccgtaacggaaattacagagtccgagtcagatccaaatcccgaggtggaatcagaagatgattccacatcagtcgaggatgtagatcctcctaccacttattactccatcatcggtggaggtctgagaatgaactttggattcaccaaatgtcctcagattaaatccatctcagaatccgctgatggaaacacagtgaatgctagattgtccagcgtgtccccaggacaaggtaaggactctcccgcgatcactcatgaagaagctcttgctatgatcaaagactgtgaggtgtctatcgacatcagatgtagcgaagaagagaaagacagcgacatcaagacccatccagtactcgggtctaacatctctcataagaaagtgagttacgaagatatcatcggttcaacgatcgtcgatacaaaatgtgtcaagaatctagagtttagcgttcgtatcggagacatgtgcaaggaatcatctgaacttgaggtcaaggatggattcaagtatgtcgacggatcggcatctgaaggtgcaaccgatgatacttcactcatcgattcaacaaaactcaaagcgtgtgtctgaatcgataactctattcatctgaaattggatgagtagggttaatcgaacgattcaggcacaccacgaattaaaaaagtgtaccggacactatattccggtttgcaaaacaaaaatgttcttaactacattcacaaaaagttacctctcgcgacttcttctttttctgtctcaatagtgtgatacgattatgacactattcctattcctattcctatttcctttcagggtatcacaaaaatattaaacctctttctgatggtctcataaaaaaagttttacaaaaatatttttattctctttctctctttgatggtctcataaaaaaagttttacaaaaatatttttattctctttctctctttgat

SEQ ID NO: 93 - DNA, 196523 bp, Vaccinia virus
  source 1..196523: mol_type = genomic DNA
  misc_feature 1..196523: note = VIR128
atcaaagagagaaagagaataaaaatatttttgtaaaactttttttatgagaccatcaaagagagaaagagaataaaaatatttttgtaaaactttttttatgagaccatcagaaagaggtttaatatttttgtgataccctgaaaggaaataggaataggaataggaatagtgtcataatcgtatcacactattgagacagaaaaagaagaagtcgcgagaggtaactttttgtgaatgtagttaagaacatttttgttttgcaaaccggaatatagtgtccggtacacttttttaattcgtggtgtgcctgaatcgttcgattaaccctactcatccaatttcagatgaatagagttatcgattcagacacacgctttgagttttgttgaatcgatgagtgaagtatcatcggttgcaccttcagatgccgatccgtcgacatacttgaatccatccttgacctcaagttcagatgattccttgcacatgtctccgatacgaacgctaaactctagattcttgacacattttgtatcgacgatcgttgaaccgatgatatcttcgtaactcactttcttatgagagatgttagacccgagtactggatgggtcttgatgtcgctgtctttctcttcttcgctacatctgatgtcgatagacacctcacagtctttgatcatagcaagagcttcttcatgagtgatcgcgggagagtccttaccttgtcctggggacacgctggacaatctagcattcactgtgtttccatcagcggattctgagatggatttaatctgaggacatttggtgaatccaaagttcattctcagacctccaccgatgatggagtaataagtggtaggaggatctacatcctcgactgatgtggaatcatcttctgattccacctcgggatttggatctgactcggactctgtaatttccgttacggattggcaaatcttatcattggtcggtgtttggtcttgctttgtgactttgataataacatcgattcccatatgatgtttgttttcttcttccgtacacgaggatgaggatgaggatgattgctgaagactggcaggcacatgcatgccaggacgatatattgtttcataattgctattgattgagtactgttctttatgattctacttccttaccatgcaataaattagaatatattttctacttttacgagaaattaattattgtatttattatttatgggtgaaaaacttactataaaaagcgggtgggtttggaattagtgatcagtttatgtatatcgcaactaccgggcatatggctatcgacatcgagaacattacccacatgataagagattgtatcagtttcgtagtcttgagtattggtattactatatagtatatagatgtcgacgctagatatacagtcgcccactagagttactgtctccgaatgcggcatgataccgtcatcattctttgctttcgttaactgtttggaggaagaatctttgttattgcatttaatctcgaaattcagagtgcacacctttctcctgtaaagaaacctgaagttgctaccttattaaggacagagaagtattcctcacgaaatacgggattacagtctttatgattcatagtaatagttagttccgacgttgagatggattcactgagaccggtagtggtcgtccgagtacacgacgtgtcgttgacgggatacagattaatttccacatcgatatagttaaaggtattactgggtacgggttcgcatttatctgcggaagagacggtgtgagaatatgttccgagaccacacggagaacagatgacgtctccggatactccgtatcctattccacattttgtttgggaaacacatgccttgcatccggatgatcctttgagaagacaataatatccgggagagcattcacagattctattgtgagtcgtgttacacgatcgcgtcttccgttacaacttagacaagcgggtaaatgattattgcgagatgtgaaggtacccgaaccacagggtgtacatcgtgtgttagtcttgctatcgcataatctggaagcgtatgttcccggacacaaattatggcgtttgtattcgttgtctttacactttccatcggatggtgcatgcggtgctatatctcttccgtttattattatacatgagagaaacaatatatacgagtataatacggacttcatgatttaataatgtagtaatcgtcgtcttgttcctgtttcctacttctccaatcatatagatattttctttctatcatggataatatttgtaatggttctttccgtacaacatactgtttagatgatattgcgcataatttccggaggcaaatacgatagtctagattgaccgatggtagactctaatttattgagtgctttgtcgacgagtttacttttatgctccatcgatagatggcactgttctatgagatcgtcgtacatgggaaatgaaatgtgtctgtccgaatgtatggctttaagatagctgtgataccgtatacaggtcggtgtcggagattcgaatctctttaaggcgacttatgtcacgatgatggaatctatcttatcgaatgatatatttttcataaatacacttttatagtcctcgtttaaacagaatttactatgtagttccgcgaatgactcgtcccttaataggcagtaggctagtatcttttttacgtagtaatcgtcgtagggagagaattctgacatcttgtagaacaacgatttaatcataggtagagatactttcagtctgtggtggatgatgtcattcacaacatccgccttgtatatgatgtttctgttttcaaacaccaagtcgaataccgtctttagtcggaaggttgatgtcgtatccgatgtatgaggcaacattgttgttacaattttgaaaggcggtattatagtattcgtctttctgaatgtcgaacctatctagtagataccgtagtatattgagagtgtatccttgattatgttttatgaatagataaagtagatgttgtccttcttccttttgttcgtgccaattgagtaacattatgagaatatgacctgttgcacaatcgttccatgatgggtgtacaatcaagattattacgtatcctcgtatcggctcctcgagataaaagagcatacaccacacgaggactatgtttggtatactgttgaaggtaagtgtgtaaccgcgttaatgtttgctccataatctattatcgcgtagatgaatcgcttctcggctcgcatcttagtgtgacttaacttgtaataattgcttttgtagaacgtggatatgtgtttacagtagtaatgaagagaagtgagtccatcctcgtcgacgcaattagggtcggatcctttgtacagaacgtaatagtttaagctcccattgaatttatatctaagataacacagcaatagatcggatgatttactaaagtcatcaatggtgtccgttagtatatcaaagatcttgttatcgattgatagtgaatgaatcagatagtggtgtagaggaatatgtcctttttcatccttgctatcaaagttacgcatgccgtggtgtaacaatatctttaatacagatggattaaatcgtgtattcatcgtatagcaatgtaatggagagttacctcgtttattcagatcgcagtgtttaataactagcttaaacagatgagacgatgtatccacatcaaagaacgtaaaatacatatgacaaacattgttgacagaaacgtgaccttcattcttaccgtcgtccataaatacgttaggtatgtaccacatactgtcgcgaacgatgcgtacaatctcgtccatctcataatgatttactttttcataattaaagatgtgaaagaaaaccgaacaatatatttttttagtaatgtttatgcgagacatataaaataaactccgtgtttatgatgccggtaaatgtttttatcatcttggacggaatcgattttgtaatatgtcatggaaacaaatgaaacaggacattatcgctccatgataaattatttaatggagtaataaagtatctccatgggtaatttcgaaatcaagttatcgtctgtattaatgttgtccactatggagtcgatcctctcattgttctttacagtttctgtaatgatggacgttagttcttttttgtaccatttgatgtcggattctttgcgtatctcaatctgtggcgtttgcttcgtttaaataatatatcaaacatggagacgcctgatatgtaggcattcttcattctattaatgtctactctatagcgctttagttccttatgacgaccggagatatcatacttactttagaaggaaaatcatcatctaggattaaggcgtatctgatacaggcgaataatggttcaggatatagatagcgtatatctctattaaatgcgtcaatcatagtctctagagtgggatggtagctaagtaataaatcaactatcctcgttttgttttctcttctgtaactacttttctggatggccgtattgattatcgagcgtgatgttgtaacactcgctccatattccaataaccgctttgcaaattgtatattattgacatcgaccgcgtaatatagtagagttttattctcattatcgatcatatctatattatccatgtacttgcttagtatatcaaatacatctattagtatggtttcataacagtgatacccgcaattattaaatctcgataatatcagaccgtacatacatagacggccattgttcgatacgtgatttacagccatgtgtccattattttccacgataaaccttacgacgtttacatcgacgagattattattaacaaagtagtcgtgcagaggatagttgttgtccgttatctaacatgcatcgaacgaccatatcgccgtaatgtaagtagtttatcaacatggcttgtacgatggattcatcctgttgtctaaatctctttagaatgttatcgatgatgtagtggttatagtctctggaatcgtaagaagtaatactacgcattacgtcgacaagagtatgacgtctctcaataagaagattaacgatttccatgtctacattatatggggttactctaaatcgcttgtttagataatccgcctctaatatagggctgacgtcgtatactctacacgtgtccacatcctttattaataatttaacaatctctatatctatggttgagcaagaccagtagtattggatgggtaaagatcctccttcgtctctgccatggatggaaacattgttattgatcaaacatttaattacatccttggatagagattgagattctctatgagacgatatatagtaatgaagagagttcttacacatatcactgtcgtacatacaggtacgaaatacgtaaccggtgctgtaacattctgatttaagaagccatagcaatacttctggtctcggattaggcgtcgttacgtatatatccaccaatccgagaccattgattgcataattcgtattcttggacggacgtatccgtttatccacaattaggtattttagcagacgtaagtcgatattatccgaagacatatacgaatacagatcgaaatcatttatattcgacttgagttcgttagaggaattcgaatagctggatatcagtagatgcacaatttgagattttacgtatctatgcttactgtatgctcctagcggagttaatccttcgttgtttctacaaagtctctcgactccgcgagagagtaacagtcgaacaatcttaatgtctgtatcgcatttattgaagacgtaacaatgtagcgcattgtttcctcgtctatctatatgttttgataagttgtgacacgtttcaatttctagttttatttttttgtacgtcacatcttcatccagtagacgacatagaatacatgtgcaatccatagctattctggtgctaattattcctatttcacgaaaaatgatgaaggcaatcattcctcataagatgataaaaagtgtagtgagagagcatgaaggagatttagtatttagcagtgcggatatgatccaagagggtgagatagtcgttctcgttcagaatctttcgcagcataagtagtatgtcgatatacttatcgttgaagactcttccagagacgatagctgattgagtacaaagtccaatgattgcacgaagttcttcggcggttttcatggagtcatttctgatgaaacatttaatgatctccacgcaattgtcgatattgtcccacggaagtgaatccttcaactcaccaccaaagagctccgttgcatcagttctgaaagagatgagaagcctgtagagagaccctgcgctttctctatgggtccatctatgagaaacccacaggatgtattcagtcagacaatgtctgacgtcggccacggtattcagggagtccttagtagcgtggcaatgacagggtctgaactgggcacaaggagaggccattgtaaaggtagacctgtagccgtttatgctaatagagggctttaatttccatttttttaatgggttgtggatgaggaatgagagtgatatcatattgagatacgtagttatgtagaggtgtatttcctatattatttactttcggtttcatattttaccaactctttaataaatttcttttcacgatgcatcttattaaatgacgttttctcataagtggacatatagatgcagaagtaatgaagaaaagtattacctctatcatctacataattagggtctgctcctttttttaacaacttatacagtacgtagtagtagtttatcggttttaaatcaagtctagaatatatagtggattaatatatttttatattagctaaagctatctatactatcagaaagcatatcattctcaacttcatcatgagttaaatatttgtgtaatggatgtcatgaacattaaacgtattcatgacatactcctttaataggttttttaaaacagatgattcaaatccttcattcattagataacagtgtaacggagtcgtaccttctactagtttgtttatatcacagcattctacaaacagtctaaacaatagagaagacggacagactttaacgtataaatgacacatgttatcgatattcgttgatgaattattattaaacgtagttatgataaatgattctaacgacatctctcgctagagataaaatctagtatcgtatcattaaacatctttgcatcatactcgcatagcatagtttttcataattaatacaatatttaaaagacttattcggaaagtattttaatacatgtatcatcgatggagatccatatgaggagtcacttgtagttcttcagtagtaataacagtgctatcatcgatagtataattatatgtagaaggttcatatgttgttgtaattggagtaactgttggtagttcttccgtggaatcaataattatactaacagcaatagtataattatataaatatgttccgttgatatcacatattttaatgaactcatttctaacaccctcagctatatctgtccaattaaatgtagccaacaatctactacgttctctttgattgactacttgtacggtagcgacgctacactatctttattgtcttctacatgctccaattgaatgtcatgatacaacgcagtttttcttatgcatgtttcataacaccacgaacatgtcgcagtaagatatatagccagagataatttctgtaaattcatgattgccggtcataaacaagcccgtcaataattgtggctatatattcagtttatagagcaaaataattaagcacaatagcgcttaatctcaaaatatgttatgtttatttttttcatattaaacatactggttaaaatcctctaaaggctgatcttcatctataaatcaagatcataattacatttagacagtggtttcatgtttataaaaatgttctttttgtgtgaataaggaatatactaatcaataatcaaccatcgaccccattacgatagtatgcaggcaaccccccattagagaggtacgtgtaatcagtctctccagttttagtatttttataagtcattgttacataaacggcttttaaacagtctcctcgataataagccatatctggaaatttattaaatactcgagtcattttacgcacggtcaaaaaagtaagtaatgtcgacgacttcttacattctatagaaacacctagaatactcattttcttttggaaaatatcctcagactctgatttgaacaatgcacgacctatagtaaaccgtgaccaataagttatattagtcaatggtatatccaaaccatcaggtgtggatagtacgccgatagtccagtctttggtatcgatagtgtagttattgaactgagaagttaccgtatagtctttttggtcatctctaaacaaggaaactaatacctctacactattgaacgatttatcttccgtaatgggtggaataacgggaatataaagtggactagcgatggatgaagtcacgaatataagacacgctattaatccgtatatcatcattttgatattacttataataacgatttgtttaatttttagtttatactattaattgtaaatgatattattatttttttaagtattatcagctttagtttatactattactatttgtaatatttagacatagataaacgtgataaaagtctatttgtttatatttattgcggatagcagtatttccctataaaaagtatacgtcctgtgttgtctttaatcatgtacatgaatggatggtttatgtagaccttcgtacgatataccatcgaaaagttagtcataaatactcctgtaacggccgatgcttctgtatactcctcattaacatctataaacgtcgtatgtagaaatttttctacagtgatagtttcattacacatcttgctaaaatctgcataatatccgaatatattagtaagtcctaaattttctaaaatcggtaccagattatacggttctgtcatttccactttaaactttggcatatacaagtctatacttttagtagataacataccacaccattttttaaatttttcatctgttatatttttttctatgttatatataccttctatgtcgtccggtagtataattaccatactagagtttccctcgtatggaatatcgataatagagaatcctccgaataattcattaatatgtacatattgcaagttattctcggtacccaccatcatatcaacactggtaactatattcttagaaatataaaacttgtctgtatatgtaagatgtttagaaaatggatatttccacattgctttaaaatggacggcgctaacaactgtcatacgagtattaatggatagcggactagtcaataaggaattaattttaccatttgtcatcgtcttaacccattcgttgattagttcctttgtttggttagcattattaaagtttacagtttgaaaatcgtcttttattttttgtaggaaggaggcgtggaactcgatactatcgctaccgtatattttatttgcggtagctagtgtcgcacaatacggaatatctacgtccatgtcattattgtcatccttcttatcatcgggtgtattctcattcatattctctatatattttgatagttgttcagctgtagaaccagctgctccatgatttagaatagataaagtagataaaatagaaactggagaaatcaaaacattttcatcagggtgttttaagattagttctttaaagatatccatggtatagaccaaacaataacgataacgatatatatcataaataaataatgttaaatttcagtttatgtttgtaccccgtattcatacttaacaaattggtattgcgtacacaatcaatcatattacataccattaataatgcaagcataaaaaatcgttagtagatgtttctaaatataggttccgtaagcaaagaatataagaatgaagcggtaatgataaaatcaatcgttatctaaaatgatcatactcatttattttattctattatattaacacatacatttttaacagcaacacattcaatattgtattgttatttttatattatttacacaattaacaatatattattagtttatattactgaattaataatataaaattcccaatcttgtcataaacacacactgagaaacagcataaacacaaaatccatcaaaaatgtcgatgaaatatctgatgttgttgttcgctgctatgataatcagatcattcgccgatagtggtaacgctatcgaaacgacattgccagaaattacaaacgctacaacagatattccagctatcagattatgcggtccagagggagatggatattgtttacacggtgactgtatccacgctagagatatcgacggtatgtattgtagatgctctcatggttatacaggcattagatgtcagcatgtagtattagtagactatcaacgttcagaaaaaccaaacactacaacgtcatatatcccatctcccggtattgtgcttgtattagtaggcattattattatgtgttgtctattatctgtttataggttcactcgaagaactaataaactacctctacaagatatggttgtgccataatttttataaatttttttatgagtatttttacaaaaaaaatgtataaagtgtatgtcttatgtatatttataaaaatgctaagtatgcgatgtatctatgttatttgtatttatctaaacaatacctctacctctagatattatacaaaaattttttatttcggcatattaaagtaaaatctagttaccttgaaaatgaatacagtgggtggttccgtatcaccagtaagaacataatagtcgaatacagtatccgattgagattttgcatacaatactagtctagaaagaaatttgtaatcattttctgtgacgggagtccatatatctgtatcatcgtctagtttatcagtgtcccatgctatatttctgttatcatcattagttaatgaaaataactctcgtgcttcagaaaagtcaaatattgtatccatacatacatctccaaaactatcgcttatacgtttatctttaacgatacctatacctagatggttatttactaacagacattttccagatctattgactataactcctatagtttccacatcaaccaagtaatgatcatctattgttatataacaataacataactcttttccatttttatcagtatgtatatctatatcaacgtcgtcgttgtagtgaatagtagtcattgatctattatatgaaacggatatgtctagaacggcaattgtcttacgtccagttaacactttcgttgatttaaagtctagagtctttgcaaacataatatccttatccgactttatatttcctgtagggtggtataattttattttgcctccacatatcggtgtttccaaatatattactagacaatattccatatagttattagttaagggtacccaattagaacacgtacgcttattatcatcatttggatcgtatttcataaaagttattgtactatcgatgtcaacacattctacattttttaatcgtctatatagtatttttctgatattttctataatatcagaattgtcttccatcggaagttgtatactatcggaatcagttacatgtttaaataattctctgatgtcattccttatacaatcaaattcattattaaacagtttaatagtctgtagacctttatcgtcgtaaatatccattgtcttattagttacgcttatttttatgtgttttacgttgctttattatattttataagaatgattgtttgacgaatcacgagaactattaagacacattattaggtatatattataaaaaagtttttgattacgatgttataagaggaaagaggacacattaacatcatacatcaattaactacattcttataacatcgtaatcaaaagaattgcaattttgatgtataacaactgtcaatgggttatggaattgtatattacatattatacggtatgttggtaacgacaaataccgatcggtaatcgtttgccggtgtaatagaattatatatatctatctattacaccggctgagtatacataataataagttgtggtagtatgatctccatatttataatttaggactttgtattcagtatttttggaatcataaaaaataaaaaaaagttttactaatttaaaatttaaaaagtatttacatttttttcactgtttagtcgcggatatggaattcgatcctgccaaaatcaatacatcatctatagatcatgtaacaatattacaatacatagatgaaccaaatgatataagactaacagtatgcattatccgaaatattaataacattacatattatatcaatatcacaaaaataaatacacatttggctaatcaatttcgggcttggaaaaaacgtatcgccggaagggactatatgactaacttatctagagatacaggaatacaacaatcaaaacttactgaaactatacgtaactgtcaaaaaaatagaaacatatatggtctatatatacactacaatttagttattaatgtggttattgattggataaccgatgtgattgttcaatcaatattaagagggttggtaaattggtacatagctaataatacctatactccaaatacacccaataatacaacaaccatttctgagttggatatcatcaaaatactaaataaatacgaggacgtgtatagagtaagtaaagaaaaagaatgtggaatttgctatgaagttgtttactcaaaacgattagaaaacgatagatactttggtttattggattcgtgtactcatatattttgcataacatgcatcaatatatggcataaaacacgaagagaaaccggtgcgtcggataattgtcctatatgtcgtacccgttttagaaacataacaatgagcaagttctataagctagttaactaataaataaaaagtttaatttgttgacgacgtatgtcgttattttttctcgtataaaagattaatttgattctaatataatctttagtattggataaatatcaattcaaattaattccattagattatatcataaataaaaatagtagcacgcactacttcagccaaatattcttttttgaaacgccatctatcgtagtgaggacacaagtgaacctataatgagcaaatttattagtatcggttacatgaaggactttacgtagagtggtgattccactatctgtggtacgaacggtttcatcttctttgatgccatcacccagatgttctataaacttggtatcctcgtccgatttcatatcctttgccaaccaatacatatagctaaactcaggcatatgttccacacatcctgaacaatgaaattctccagaagatgttacaatgtctagatttggacatttggtttcaaccgcgttaacatatgagtgaacacacccatacatgaaagcgatgagaaataggattttcatcttgccaaaatatcactagaaaaaatttatttatcaattttaaaggtataaaaaatacttattgttgctcgaatattttgtatttgatggtatacggaagattagaaatgtaggtattatcatcaactgattctatggttttatgtattctatcatgtttcactattgcgttggaaataatatcatatgcttccacatatattttattttgttttaactcataatactcacgtaattctggattattggcatatctgtgaataattttagctccatgatcagtaaatattaatgagaacatagtattaccacctaccattatttttttcatttcgttcaattcttgattgcaaagatctatataatcattatagcgttgacttatggactctggaatcttagacgatgtacagtcatctataatcatggcatatttaatacattgttttatagcatagtagttatctacgatgttagatatttctctcaatgaatcaatcacacaatctaatgtaggtttatgacataatagcattttcagcagttcaatgtttctagattcgttgatggcaatggctatacatgtatatccgttatttgatctaatgttgacatctgaaccggattctagcagtaaagatactagagattgtttattatatctaacagccttgtgaagaagtgtttctcctcgtttgtcaatcatgttaatgtctttaagataaggtaggcaaatgtttatagtactaagaattgggcaagcataagacatgtcacaaagaccctttttgtatgtataagtgtagaaattataacatccatagttggatttacataggtgtccaatcgggatctctccatcatcgagatgattgacggcatctcccccttccttttttagtagatatttcatcgtgtaagaatcaatattaatatttctaaagtatccgtgtatagcctctttatttaccacagctccatattccaacatgcattccactaaagggatatcgatatcgccgaatgtcatatactcaattagtatatgttggaggacatccgagttcattgttttcaatatcaaagagatggtttccttatcatttctccatagtggtacaatactacacattattccgtgaggctttccattctccaaaaacaatttgaccaaatctacatctttattgtatctataatcactatttagataatcagccataattcctcgagtgcaacatgttagatcgtctatatatgaataagccgtgttatctattcctttcattaacaatttaacgatgtctatatctatatgagatgacttaatataatattgaagagctgtacaatagtttttatctatagaagacggcttgattccgtgattaattagacatttaacaacttccggacgcacatatgctctcgtatccgactctgaatacagatgagagatgatatacagatgcaatacggtaccgcaatttcgtagttgataatcatcatacgcgtatccgtactcgtcctcataaagaacactgcagccattttctatgaacaaatcaataattttaggaacaggatcattgtcattacataattttctataactgaacgatggttttcacatttaacactcaagtcaaatccatgttctaccaacacctttatcaagtcaacgtctacatttttggatttcatatagctgaatatattaaagtcatttatgttgctaaatccagtggcttctagtagagccatcgctatatcctttaactttaacatgtctactatttgtgtattcttctaatggggtagctgtctccaatttttgcgtaatggattagtgccactgtctagtagtagtttgacgacctcgacattattacaatgctcattaaaaaggtatgcgtgtaaagcattattcttgaattggttcctggtatcattaggatctctgtctctcaacatctgtttaagttcatcgagagccacctcctcattttccaaatagtcaaacattttgactgaatagaagtgaatgagctactgtgaactctatacacccacacaactaatgtcattaaatattatttttttgaatgtatttataccatgtcaaaaacttgtacaattattaataaaaataatttagtgtttaaattttaccagttccagattttacacctccgttaaccccactttttacaccactggacgaccctcctccccacattccaccgccaccagatgtataagttttagatcctttattactaccatcatgtccatggataaagacactccacatgccgccactaccccctttagaagacatattaataagacttaagagttaaggacaagtttaacaataaaattaatcacgagtaccctactaccaacctacactattatatgattatagtttctatttttacagtaccttaactaaagtttctagtcacaagagcaatactaccaacctacactattatatgattatagtttctatttttataggaacgcgtacgagaaaatcaaatgtctaatttctaacggtagtgttgataaacgattatcgtcaatggatacctcctctatcatgtcgtctattttcttactttgttctattaacttattagcattatatattatttgattataaaacttatattgcttattagcccaatctgtaaatatcggattattaacatatcgtttctttgtaggtttatttaacttgtacatcactgtaagcatgtccgtaccatttattttaatttgacgcatatccgcaatttctttttcgcagtcggttataaattctatatatgatggatacatgctacatgtgtacttataatcgactaatatgaagtacttgatacatattttcagtaacgatttattattaccacctatgaataagtacctgtgatcgtctaggtaatcaactgttttcttaatacattcgatggttggtaatttactcagaataatttccaatatcttaatatataattctgctatttctggaatatatttatctgccagtataacacaaatagtaatacatgtaaacccatattttgttattatattaatgtctgcgccattatctattaaccattctactaggctgacactatgcgacttaatacaatgataaagtatactacatccatgtttatctattttgtttatatcatcaatatacggcttacaaagttttagtatcgataacacatccaactcacgcatagagaaggtagggaataatggcataatatttattaggttatcatcattgtcattatctacaactaagtttccattttttaaaatatactcgacaactttaggatctctattgccaaatttttgaaaatatttatttatatgcttaaatctatataatgtagctccttcatcaatcatacatttaataacattgatgtatactgtatgataagatacatattctaacaatagatcttgtatagaatctgtatatcttttaagaattgtggatattaggatattattacgtaaactattacacaattctaaaatataaaacgtatcacggtcgaataatagttgatcaactatataattatcgattttgtgatttttcttcctaaactgtttacgtaaatagttagatagaatattcattagttcatgaccactatagttactatcgaataacgcgtcaaatatttcccgtttaatatcgcatttgtcaagataataatagagtgtggtatgttcacgataagtataataacgcatctctttttcgtgtgaaattaaatagtttatcacgtccaaagatgtagcataaccatcttgtgacctagtaataatataataatagagaactgttttacccattctatcatcataatcagtggtgtagtcgtaatcgtaatcgtctaattcatcatcccaattataatattcaccagcacgtctaatctgttctattttgatcttgtatccatactgtatgttgctacatgtaggtattcctttatccaataatagtttaaacacatctacattgggatttgatgttgtagcgtatttctctacaatattaataccatttttgatactatttatttctatacctttcgaaattagtaatttcaataagtctatatcgatgttatcagaacatagatattcgaatatatcaaaatcattgatatttttatagtcgactgacgacaataacaaaatcacaacatcgtttttgatattattatttttcttggtaacgtatgcctttaatggagtttcaccatcatactcatataatggatttgcaccactttctatcaatgattgtgcactgctggcatcgatgttaaatgttttacaactatcatagagtatcttatcgttaaccatgattggttgttgatgctatcgcattttttggtttctttcatttcagttatgtatggatttagcacgtttgggaagcataagctcatatgatttcagtactgtagtgtcagtactattagtttcgatcagatcaatgtctagatctatagaatcaaaacacgataggtcagaagataatgaatatctgtaggcttcttgttgtactgtaacttctcgttttgttagatggttgcatcgtgctttaacatcaatggtacaaattttatcctcgctttgtgtatcatattcgtccctactataaaattgtatattcagattatcatgagatgtgtatacgctaacggtatcaataaacggagcacaccatttagtcataaccgtaatccaaaaatttttaaagtatatcttaacgaaagaagttgtgtcattgtctacggtgtatggtactagatcctcataagtgtatatatctagagtaatgtttaatttatcaaatggttgataatatggatcctcatggcaatttcctaagacgaaaataagacataaacacgcaataaatctaattgcggacatggttactccttaaaaaaatactaataatcaccttggctatttagtaagtgtcatttaacactatactcatattaatccatggactcataatctctatacgggattaacggatgttctatatacggggatgagtagttctcttctttaactttatactttttactaatcatatttagactgatgtatgggtaatagtgtttgaagagctcgttctcatcatcagaataaatcaatatctctgtttttttgttatacagatgtattacagcctcatatattacgtaatagaacgtgtcatctaccttattaactttcaccgcatagttgtttgcaaatacggttaatcctttgacctcgtcgatttccgaccaatctgggcgtataatgaatctaaactttaatttcttgtaatcattcgaaataatttttagtttgcatccgtagttatcccctttatgtaactgtaaatttctcaacgcgatatctccattaataatgatgtcgaattcgtgctgtatacccatactgaatggatgaacgaataccgacggcgttaatagtaatttactttttcatctttacatattgggtactagttttactatcataagtttataaattccacaagctactatggaataagccaaccatcttagtataacacacatgtcttaaagtttattaattaattacatgttgttttatatatcgctacgaatttaaacagagaaatcagtttaggaaaaaaaattatctatctacatcatcacgtctctgtattctacgatagagtgctactttaagatgagacatatccgtgtcatcaaaaatatactccattaaaatgattattccggcagcgaacttgatattggatatatcacaacctttgttaatatctacgacaatagacagcagtcccatggttccataaacagtgagtttatctttctttgaagagatattttgtagagatcttataaaactgtcgaatgacatcgcatttatatctttagctaaatcgtatatgttaccatcgtaatatctaaccgcgtctatcttaaacgtttccatcgctttaaagacgtttccgatagatggtctcatttcatcagtcatactgagccaacaaatataatcgtgtataacatctttgatagaatcagactctaaagaaaacgaatcggctttattatacgcattcatgataaacttaatgaaaaatgtttttcgttgtttaagttggatgaatagtatgtcttaataattgttattatttcattaattaatatttagtaacgagtacactctataaaaacgagaatgacataactaatcataactagttatcaaagtgtctaggacgcgtaattttcatatggtatagatcctgtaagcattgtctgtattctggagctattttctctatcgcattagtgagttcagaatatgttataaatttaaatcgaataacgaacataactttagtaaagtcgtctatattaactcttttattttctagccatcgtaataccatgtttaagatagtatattctctagttactacgatctcatcgttgtctagaatatcacatactgaatctacatccaattttagaaattggtctgtgttacatatctcttctatattattgttgatgtattgtcgtagaaaactattacgtagaccattttctttataaaacgaatatatagtactccaattatctttaccgatatatttgcacacataatccattctctcaatcactacatctttaagattttcgttgttaagatatttggctaaactatataattctattagatcatcaacagaatcagtatatatttttctagatccaaagacgaactctttggcgtcctctataatattcccagaaaagatattttcgtgttttagtttatcgagatctgatctgttcatatacgccatgattgtacggtacgttatgataaccgcataaaataaaaatccattttcatttttaaccaatactattcataattgagattgatgtaatactttgttactttgaacgtaaagacagtacacggatccgtatctccaacaagcacgtagtaatcaaatttggtgttgttaaacttcgcaatatttatcaatttagatagaaacttatactcatcatctgttttaggaatccatgtattattaccactttccaacttatcattatcccaggctatgtttcgtccatcatcgttgcgcagagtgaataattcttttgtattcggtagttcaaatatataatccatgcatagatcggtaaagctattgtagatgtgatttttcctaaatctaatataaaactcgtttactagcaaacactttcctgatttatcgaccaagacacatatggtttctaaatctatcaagtggtggggatccatagttatgacgcagtaacatagattattaccttcttaactgtcgctaatatctatatatttattgttatcgtattggattctgcatatagatggcttgtatgtcaaagatatagaacacataaccaatttatagtcgcgctttacattctcgaatctaaagttaagagatttagaaaacattatatcctcggatgatgttatcactgtttctggagtaggatatattaaagtctttacagatttcgtccgattcaaataaatcactaaataatatcccacattatcatctgttagagtagtatcattaaatctattatattttatgaaagatatatcactgctcacctctatatttcgtacatttttaaactgtttgtataatatctctctgatacaatcagatatatctattgtgtcggtagacgataccgttacatttgaattaatggtgttccattttacaacttttaacaagttgaccaattcatttctaatagtatcaaacgctccatgattaaatattttaatagtatccattttatatcactacggacacaaagtagctgacataaaccattgtataatttttatgttttatgtttattagcgtacacattttggaagttccggcttccatgtatttcctggagagcaagtagatgatgaggaaccagataggttatatccgtacttgcacttaaagtttacattgtcgttgtatgagtatgatcttttaaacccgctagacaagtatccgtttgatattgtaggatgtggacatttaacaatctgacacgtgggtggatcggaccattctcctcctgaacacaggacaccagagttaccaatcaacgaatatccactattgcaactataagttacaacgcttccatcggtataaaaatcctcgtatccgttatgtcttccgttggatatagatggaggggattggcatttaacagattcacaaataggtgcctcgggattccataccatagatccagtagatcctaattcacaatacgatttagattcaccgatcaaatgatatccgctattacaagagtacgttatactagagccaaagtctactccgccaatatcaagttggccattatcgatatctcgaggcgatgggcatctccgtttaatacattgattaaagagtgtccatccagtacctgtacatttagcatatataggtcccattttttgctttctgtatccaggtagacatagatattctatagtgtctcctatgttgtaattagcattagcatcagtctccacactattcttaaatttcatattaatgggtcgtgacggaatagtacagcatgatagaacgcatcctattcccaacaatgtcaggaacgtcacgctctccaccttcatatttatttatccgtaaaaatgttatcctggacatcgtacaaataataaaaagcccatatatgttcgctattgtagaaattgtttttcacagttgctcaaaaacgatggcagtgacttatgagttacgttacactttggagtctcatctttagtaaacatatcataatattcgatattacgagttgacatatcgaacaaattccaagtatttgattttggataatattcgtattttgcatctgctataattaagatataatcaccgcaagaacacacgaacatctttcctacatggttaaagtacatgtacaattctatccatttgtcttccttaactatatatttgtatagataattacgagtctcgtgagtaattccagtaattacatagatgtcgccgtcgtactctacagcataaactatactatgatgtctaggcatgggagacttttttatccaacgatttttagtgaaacattccacatcgtttaatactacatatttttcatacgtggtataaactccacccattacatatatatcatcgtttacgaataccgacgcgcctgaatatctaggagtaattaagtttggaagtcttatccatttcgaagtgccgtgtttcaaatattctgccacacccgttgaaatagaaaattctaatcctcctattacatataactttccattgttaacacaagtactaacttctgattttaacgacgacatattagtaaccgttttccattttttcgtttcaagatctacccgcgatacggaataaacatgtctattgttaatcatgccgccaataatgtatagacaattatgtaaaacatttgcattatagaattgtctatctgtattaccgactatcgtccaatattctgttctaggagagtaatgggttattgtggatatataatcagagtttttaatgactactatattatgttttataccatttcgtgtcactggctttgtagatttggatatagttaatcccaacaatgatatagcattgcgcatagtattagtcataaacttgggatgtaaaatgttgatgatatctacatcgtttggatttttatgtatccactttaataatatcatagctgtaacatcctcatgatttacgttaacgtcttcgtgggataagatagttgtcagttcatcctttgataattttccaaattctggatcggatgtcaccgcagtaatattgttgattatttctgacatcgacgcattatatagttttttaattccatatcttttagaaaagttaaacatccttatacaatttgtggaattaatattatgaatcatagtttttacacatagatctactacaggcggaacatcaattattatggcagcaactagtatcatttctacattgtttatggtgatgtttatcttcttccagcgcatatagtctaatagcgattcaaacgcgtgatagtttataccattcaatataatcgcttcatcctttagatggtgatcctgaatgcgtttaaaaaaattatacggagatgccgtaataatttccttattcacttgtataatttccccattgatagaaaatatcacgctttccattcttgaagtactataagtaattatagtataatgtaaaggtttatatattcaatattttttataaaaaaatcatttcgacattaattcctttttaaatttccgtctatcatctatagaaacatattctatgaatttataaaatgcttttacgtgtcctatcgtaggcgatagaaccgctaaaaagcctattgaatttctacaaaagaatctattatatggtatagggagagtataaaacattaaatgcccgtacttattaaagtattcagtagccaatcctaactctttcgaatacttattaatggctcttgttctgtacgaatctatttttttgaacaacggacctagtggtatatcttgttctatgtatctaaaataatgtctgactagatccgttagtttaatatcctcagtcatcttgtctagaatggcaaatctaactgcgggtttaggctttagtttagtttttatatctacatctatgtctttatctaacaccaaaaatataatagctaatattttattacaatcatccggatattcttctacgatctcactaactaatgtttctttggttatactagtatagtcactatcggacaaataaagaaaatcagatgatcgatgaataatacatttaaattcatcatctgtaagatttttgagatgtctcattaaaatattattagggtcagtactcattatcattaggcagctattacttattttattatttttcaccatatagatcaatcattagatcatcaaaatatgtttcaatcatcctaaagagtatggtgaatgactcttcccatctaatttctgaacgttcaccaatgtctctagccactttggcactaatagcgatcattcgcttagcgtcttctatattattaactggttgattcaatctatctagcaatggaccgtcggacagcgtcattctcatgttcttaatcaatgtacatacatcgccgtcatctaccaattcatccaacaacataagctttttaaaatcatcattataataggtttgatcgttgtcatttctccaaagaatatatctaataagtagagtcctcatgcttagtaatttaactattttagttaacaactattttttatgttaaatcaattagtacaccgctatgtttaatacttattcatattttagtttttaggattgagaatcaatacaaaaattaatgcatcattaattttagaaatacttagtttccacgtagttaatgaaacatttgaactcatcgtacaagacgttctcgtacaggacgtaactataaaccggtttatatttgttcaagatagatacaaatccgataactttttttacgaattctacgggatccactttaaaagtgtcataccgggttctttttatttttttaaacagatcaatggtgtgatgttgattaggtcttttacgaatttgatatagaatagcgtttacatattctccataatggtcaatcgccatttgttcgtatgtcataaattctttaattatatgacactgtgtattgtttagttcatccttgttcattgttaggaatctatccaaaatggcaattatactagaactataggtgcgttgtatacacatattgatgtgtctgtttatacaatccatgatatttggatccatgctactaccttcgggtaaaattgtagcatcatataccatttctagtactttaggttcattattatccattgcagaggacgtcatgatcgcatcctaaaaaaatatattatttttatgttattttgttaaaaataatcatcgaatacttcgtaagatactccttcatgaacataatcagttacaaaacgtttatatgaagtaaagtatctacgatttttacaaaagtccggatgcataagtacaaagtacgcgataaacggaataataatagatttatctagtctatctttttctatagctttcatagttagatacatggtctcagaagtaggattatgtaacatcagcttcgataaaatgactgggttatttagtcttacacattcgctcatacatgtatgaccgttaactacagagtctacactaaaatgattgaacaatagatagtctaccattgtttcgtattcagatagtacagcgtagtacatggcatcttcacaaattatatcattgtctaatagatatttgacgcatcttatggatcccacttcaacagccatcttaaaatcggtaaaatcatattgctttcctttatcattaataatttctaaaacatcatctctatcataaaagatacaaatattaactgtttgatccgtaataacattgctagtcgatagcaatttgttaataagatgcgctgggctcaatgtcttaataagaagtgtaagaggactatctccgaatttgttttgtttattaacatccgttgatggaagtaaaagatctataatgtctacattcttgactgttttagagcatacaatatggagaggtgtatttccatcatgatctggttttgagggactaattcctagtttcatcatccatgagattgtagaagcttttggattgtctgacataagatgtctatgaatatgatttttgccaaatttatccactatcctggcttcgaatccgatggacattatttttttaaacactctttctgaaggatctgtacacgccaacaacggaccacatccttcttcatcaaccgagttgttaatcttggctccatactgtaccaataaatttattctctctatgacttcatcatctgttcccgagagataatatagaggcgttttatgctgtttatcacacgcgtttggatctgcgccgtgcgtcagcagcatcgcgactattctattattattaattttagaagctatatgcaatggataatttccatcatcatccgtctcatttggagagtatcctctatgaagaagttcttcgacaaatcgttcatctagtcctttaattccacaatacgcatgtagaatgtgataattatttccagaaggttcgatagcttgtagcatattcctaaatacatctaaatttttactattatatttggcataaagagatagataatactcggccgacataatgttgtccattgtagtataaaaattaatatttctatttctatttctgtatatttgcaacaatttactctctataacaaatatcataacttagttcttttatgtcaagaaggcactggtttagttcatctataaatgtcacgccataactaccacgcatgctatactcagaattatgataaagatatttatccttggggtgtaggtaatggggattaatctttgttggatcagtctctaagttaacacatgtcacacatgatccatttatagttatatcacacgatgatgatttatgaattgattccggaagatcgctatcgtattttgtggttccacaattcatttccatacatgttattgtcacactaatattatgatgaactttatctagccgctgagtggtaaacaacagaacagatagtttattatctttaccaacaccctcagccgctgccacaaatctctgatccgtatccatgatggtcatgtttatttctagtccgtatccagtcaacactatgttagcatttctgtcgatatagctttcactcatatgacactcaccaataatagtagaattaatgtcgtaatttacaccaatagtgagttcggcggcaaagtaccaataccggtaatcttgtcgaggaggacatatagtattcttgtattctaccgaatacccgagagatgcgatacaaaagagcaagactaatttgtaaaccatcttactcaaaatatgtaacaatagtacgatgcaatgagtaagacaataggaaatctatcttatatacacataattattctatcaattttaccaattagttagtgtaatgttaacaaaaatgtgggagaatctaattagtttttctttacacaattgacgtacatgagtctgagttccttgtttttgctaattatttcatccaatttattattcttgactatatcgagatcttttgtataggagtcagacttgtattcaacatgcttttctataatcattttagctatttcggcatcatccaatagtacattttccagattagcagaatagatattaatgtcgtatttgaacagagcctgtaacatctcaatgtctttattatctatagccaatttaatgtccggaatgaagagaagggaattattggtgtttgtcgacgtcatatagtcgagcaagagaatcatcatatccacgtgtccattttttatagtggtgtgaatacaactaaggagaatagccagatcaaaagtagatggtatttctgaaagaaagtatgatacaatacttacatcattaagcatgacggcatgataaaatgaagttttccatccagttttcccatagaacatcagtctccaatttttcttaacaaacagttttaccgtttgcatgttaccactatcaaccgcataatacaatgcagtgtttcccttgtcatcaaattgtgaatcatccagtccactgaatagcaaaatctttactattttggtatcttccaatgtggctgcctgatgtaatggaaattcattctctagaagatttttcaatgctccagcgttcaacaacgtacatactagacgcacgttattatcagctattgcataatacaaggcactatgtccatggacatccgccttaaatgtatctttactagagagaaagcttttcagctgcttagacttccaagtattaattcgtgacagatccatgtctgaaacgagacgctaattagtgtatattttttcattttttataattttgtcatattgcaccagaattaataatatctctaatagatctgattagtagatacatggctatcgcaaaacaacatatacacatttaataaaaataatatttattaagaaaattcagatttcacgtacccatcaatataaataaaataatgattccttacaccgtacccatattaaggagattccaccttacccataaacaatataaatccagtaatatcatgtctaatgatgaacacaaatggtgtattaaattccagtttttcaggagatgatctcgccgtagctaccataatagtagatgcctctgctacagttccttgttcgtcgacatctatctttgcattctgaaacattttataaatatataatgggtccctagtcatatgtttaaacgacgcattatctggattaaacatactaggagccatcatttcggctatcgacttaatatccctcttattttcgatagaaaatttagggagtttaagattgtacactttattccctaattgaaacgaccaatagtctaattttgcagccgtaatagaatctgtgaaatgggtcatattatcacctattgccaggtacatactaatattagcatccttatacggaaggcgtaccatgtcatattctttgtcatcgattgtgattgtatttccttgcaatttagtaactacgttcatcatgggaaccgttttcgtaccgtacttattagtaaaactagcattgcgtgttttagtgatatcaaacggatattgccatgtacctttaaaatatatagtattaatgattgcccatagagtattattgtcgagcatattagaatctactacattagacataccggatctacgttctactatagaattaattttattaaccgcatctcgtctaaagtttaatctatataggccgaatctatgatattgttgataatacgacggtttaatacacacagtattatctacgaaactttgataagttagatcagtgtacgtatatttagatgttttcagcttagctaatcctgatattaattctgtaaatgctggacccagatctctttttctcaaatccatagtcttcaataattctattctagtattacctgatgcaggcaatagcgacataaacatagaaaacgaatagccaaacggcgagaagacaatattatcatcttgaatatttttatacgctactataccggcattggtaaatccttgcagacgataggtagacgctgaacacgttaacgatagtatcaataacgcaatcatgattttatggtattaataattaaccttatttttatgttcggtataaaaaaattattgatgtctacacatccttttgtaattgacatctatatatccttttgtataatcaactctaatcactttaacttttacagttttccctaccagtttatccctatattcaacatatctatccatatgcatcttaacactctctgccaagatagcttcagagtgaggatagtcaaaaagataaatatatagagcataatccttctcgtatactctgccctttattacatcgcccgcattgggcaacgaataacaaaatgcaagcatcttgttaacgggctcgtaaattgggataaaaattatgtttttatatctattttattcaagagaatattcaggaatttctttttccggttgtatctcgtcgcagtatatatcatttgtacattgtttcatattttttaatagtttacaccttttagtaggactagtatcgtacaattcatagctgtattttgaattccaatcacgcataaaaatatcttccaattgttgacgaagacctaatccatcatccggtgtaatattaatagatgctccacatgtatccgtaaagtaatttcctgtccaatttgaggtacctatataggccgttttatcggttaccatatatttggcatggtttaccctagaatacggaatgggaggatcagcatctggtacaataaatagctttacttctatatctatgtttttagattttagcatagcgatagatcttaaaaagtttctcatgataaacgaagatcgttgccagcaactaatcaatagcttaacggatacttgtctgtctatagcggatcttcttaattcatcttctatataaggccaaaacaaaattttacccgccttcgaataaataatagggataaagttcataacagatacataaacgaatttactcgcatttctaatacatgacaataaagcggttaaatcattggttctttccatagtacatagttgttgcggcgcagaagcaataaatacagagtgtggaacaccacttacgttaatactaagaggatgatctgtattataatacgacggataaaagtttttccaattatatggtagattgttaactccaagataccagtatacctcaaaaatttgagtgagatccgctgccaagttcctattattgaagatcgcaatacccaattctttgacctgagttagtgatctccaatccatgttagcgcttcctaaataaatatgtgtattatcagatatccaaaattttgtatgaagaactcctcctaggatatttgtaatatctatgtatcgtacttcaactccggccatttgtagtctttcaacatcctttaatggtttgttagatttattgacggctactctaactcttactcctcttttgggtaattgtacaatctcgtttaatattatcgtgccgaaattcgtacccacttcatccgataaactccaataaaaagatgatatatctagtgtttttgtggtattggatagaatttccctccacatgttaaatgtagacaaatatactttatcaaattgcatacctataggaatagtctctgtaatcactgcgattgtattatccggattcattttatttgttaaaaaataatcctatatcacttcactctattaaaaatccaagtttctatttctttcatgactgattttttaacttcatccgtttccttatgaagatgatgtttggcaccttcataaatttttatttctctattacaatttgcatgttgcatgaaataatatgcacctaaaacatcgctaatctcattgtttgttccctggagtatgagagtcgggggggtgttaatcttggaaattatttttctaaccttgttggtagccttcaagacctgactagcaaatccagccttaattttttcatgattgattaatgggtcgtattggtatttataaactttatccatatctctagatactgattctggacatagctttccgactggcgcatttggtgtgatggttcccataagtttggcagctagcagattcagttttgaaacagcatctgcattaactagaggagacattagaatcattgctgtaaacaagtttggattatcgtaagaggctagtatagaaattgttgctcccatggaatgacccaataagtagatttaatagttaccacgtgctgtaccaaagtcatcaatcatcattttttcaccattacttcttccatgtccaatatgatcatgtgagaatactaaaattcctaacgatgatatgttttcagctagttcgtcataacgtccagaatgtttaccagctccatgacttatgaatactaatgccttaggatatgtaataggtttccaatatttacaatatatgtaatcattgtccagattgaacatacagtttgcactcatgattcacgttatataactatcaatattaacagttcgtttgatgatcatattatttttatgttttattgataattgtaaaaacatacaattaaatcaatatagaggaaggagacggatactgtcttttgtgagatagtcatggcgactaaatcagattatgaggatgctgttttttactttgtggatgatgataaaatatgtagtcgcgactccatcatcgatctaatagatgaatatatcacgtggagaaatcatgttatagtgtttaacaaagatattaccagttgtggaagactgtacaaggaattgatgaagttcgatgatgccgctatacagtactatggtattgataaaattaatgagattgtcgaagctatgagcgaaggagaccactacatcaattttacaaaagtccatgatcaggaaagtttattcgctaccataggaatatgtgctaaaatcactgaacattggggatacaaaaagatttcagaatctagattccaatcattgggaaacattacagatctgatgaccgacgataatataaacatcttgatactttttctagaaaaaaaattgaattgatgatataggggtcttcataacgcataattattacgttagcattctatatccgtgttaaaaaaaattatcctatcatgtatttgagagttttatatgtagcaaacatgatagctgtgatgccaataagctttagatattcacgcgtgctagtgttagggatggtattatctggtggtgaaatgtccgttatataatctacaaaacaatcatcgcatatagtatgcgatagtagagtaaacatttttatcgtttctactgggttcatacatcgtctacccaattcggttatgaatgaaattgtcgccaatcttacacccaaacccttgttatccattagcatagtattaacttcgttatttatgtcataaactgtaaatgattctgtagatgccatatcatacatgatattcatgtccctattataatcattactaactttatcacaatatatgttgataatatctatatatgatctagtctttgtgggcaactgtctatacaagtcgtctaaacgttgtttactcatatagtatcgaacagccatcattacatggtcccgttccgttgatagataatcgagtatgttagtggacttgtcaaatctatataccatattttctggaagtggatatacatagtcgtgatcaacattattgctagcctcatcttctatatcctgtactataccattatctatatcatctacataatctacgatattattatacataaacatcgacaacatactattgtcaattatctaagtcctgttgatccaaacccttgatctcctctatctgtactatctagagattgtacttcttccagttctggataatatatacgttgatagattagctgggctattctatcccccgtatttacattaaacgtacattttccattattaataagaataactcctatgtttcccctataatcttcgtctattacaccgcctcctatatcaatgccttttagggacagaccagacctaggagctattctaccatagcagaacttaggcatggacatactaatatctgtcttaattaactgtcgttctccaggagggatagtataatcgtaagcgctatataaatcatatccggcggcgtaaggtgattgcctagtaggagatttagctctgttagtttccttaacaaatctaactggtgagttaatattcatgttgaacataaaactaatattttatttcaaaattatttaccatcccatatattccatgaataagtgtgatgattgtacacttctatagtatctatatacgattcacgataaaatcctcctatcaatagcagtttattatccactatgatcaattctggattatccctcggataaataggatcatctatcagagtccatgtattgctggattcacaataaaattccgcatttctaccaaccaagaataaccttctaccgaacactaacgcgcatgatttataatgaggataataagtggatggtccaaactgccactgatcatgattgggtagcaaatattctgtagttgtatcagtttcagaatgtcctcccattacgtatataacattgtttatagatgccactgctggattacatctaggtttcagaagactcggcatattaacccaagcagcatccccgtggaaccaacgctcaacagatgtgggatttggtagacctcctactacgtataatttattgttagcgggtatcccgctagcatacagtctggggctattcatcggaggaattggaatccaattgtttgatatataatttacagctatagcattgttatgtatttcattgttcatccatccaccgatgagatatactacttctccaacatgagtacttgtacacatatggaatatatctataatttgatccatgttcataggatactctatgaatggatacttgtatgatttgcgtggttgtttatcacaatgaaatattttggtacagtctagtatccattttacattatttatacctctgggagaaagataatttgacctgattacatttttgataaggagtagcagatttcctaatttatttcttcgctttatataccacttaatgacaaaatcaactacataatcctcatctggaacatttagttcatcgctttctagaataagtttcatagatagataatcaaaattgtctatgatgtcatcttccagttccaaaaagtgtttggcaataaagtttttagtatgacataagagattggatagtccgtattctatacccatcatgtaacactcgacacaatattcctttctaaaatctcgtaagataaagtttatacaagtgtagatgataaattctacagaggttaatatagaagcacgtaataaattgacgacgttatgactatctatatatacctttccagtatatgagtaaataactatagaagttaaactgtgaatgtcaaggtctagacaaacccttgtaactggatctttatttttcgtgtatttttgacgtaaatgtgtgcgaaagtaaggagataactttttcaatatcgtagaattgactattatattgccacctatagcatcaataattgttttgaatttcttagtcatagacaatgctaatatattcttacagtacacagtattaacaaatatcggcatttatgtttctttaaaagtcaacatctagagaaaaatgattatctttttgagacataactcccattttttggtattcacccacacgtttttcgaaaaaattagtttttccttccaatgatatattttccatgaaatcaaacggattggtaacattataaatttttttaaatcccaattcagaaatcaatctatccgcgacgaattctatatatgttttcatcatttcacaattcattcctataagtttaactggaagagccgcagtaagaaattcttgttcaatggatactgcatctgttataatagatctaacggtttcttcactcggtggatacaataaatgtttaaacatcaaacatgcgaagtcgcagtgtagaccctcgtctctactaattagttcgttggaaaacgtgagtccgggcattaggccacgctttttaagccaaaatatggaagcgaatgatccggaaaagaagattccttctactgcagcaaaggcaataagtctctctccataaccggcgctgtcatgtatccacttttgagcccaatcggccttcttttttacacaaggcattgtttctatggcattaaagagatagtttttttcattactatctttaacataagtatcgatcaaaagactatacatttccgaatgaatgttttcaatggccatctgaaatccgtagaaacatctagcctcggtaatctgtacttctgtacaaaatcgttccgccaaattttcattcactattccgtcactggctgcaaaaaacgccaatacatgttttataaaatatttttcgtctggtgttagtttattccaatcattgatatctttagatatatctacttcttccactgtccaaaatgatgcctctgcctttttatacatgttccagatgtcatgatattggattgggaaaataacaaatctatttggatttggtgcaaggatgggttccataactaaattaacaatatcaataaattttttttcagttatctatatgcctgtacttggattttttgtacatcgatatcgccgcaatcactacaataattacaagtattattgatagcattgttattagtactatcataattaaattatcgacattcatgggtgctgaataatcgttattatcatcattatcattttgtaattgtgacatcatactaaataaatcgtttgcgagattgttgtgggaagcgggcatggaggatgcattatcattattatttaacgccttccatttggattcacaaatatggcgcgcgttcaacattttatggaaactataattttgtgaaaacagataacaagaaaactcgtcatcgttcaaatttttaacgatagtaaaccgattaaacgtcgagctaatttctaacgctagcgactctgttggatatgggtttccagatatatatcttttcagttcccctacgtatctataatcatctgtaggaaatggaagatatttccatttatctactgttcctaatatcatatgtggtggtgtagtagaaccattaagcgcgaaagatgttatttcgcatcgtattttaacttcgcaataatttctggttagataacgcactctaccagtcaagtcaatgatattagcctttacagatatattcatagtagtcgtaacgatgactccatcttttagatgcgatactcctttgtatgtaccagaatcttcgtacctcaaactcgatatatttaaacaagttaatgagatattaacgcgttttatgaatgatgatatataaccagaagttttatcctcggtggctagcgctataaccttatcattataataccaactagtgtgattaatatgtgacacgtcagtgtgggtacaaatatgtacattatcgtctacgtcgtattcgatacatccgcatacagccaacaaatataaaatgacaaatactctaacgccgttcgtacccatcttgatgcggtttaataaatgttttgatttcaatttattgtaaaaaaagattcggttttatactgttcgatattctcattgcttatattctcatctatcatctccacacagtcaaatccgtggttagcatgcacctcatcaaccggtaaaagactatcggactcttctatcattataactctagaatatttaatttggtcattattaatcaagtcaattatcttatttttaacaaacgtgagtattttactcattttttataaaaacttttagaaatatacagactctatcgtgtgtctatatcttctttttatatccaatgtatttatgtctgatttttcttcatttatcatatataatggtccaaattctacacgtgcttcggattcatccagatcattaaggttcttataattgtaacatccttctcttccctcttctacatcttccttcttattcttattcttagcgtcacagaatctaccacagcaggatcccatgacgagcgtcatattaaactaatccattttcaattataatatatgattagtaatgaccattaaaataaaaaatattcttcataaccggcaagaaagtgaaaagttcacattgaaactatgtcagtagtatacatcatgaaatgatgatatatatatactctattttggtggaggattatatgatataattcgtggataatcattcttaagacacatttcttcattcgtaaatcttttcacgttaaatgagtgtccatattttgcaatttcttcatatgatggcggtgtacgtggacgaggctgctcctgttcttgttgtggtcgccgactgtcgtgtttgcgtttatccctccattatcgcgattgcgtagatggagtactattatataccttgtaattaaatttttttattaattaaacgtataaaaacgttccgtatctgtatttaagagccagatttcgtctaatagaacaaatagctacagtaaaaataactagaataattgctacacccactagaaaccacggatcgtaatacggcaatcggttttcgataataggtggaacgtatattttatttaaggacttaacaattgtctgtaaaccacaatttgcttccgcggatcctgtattaactatctgtaaaagcatatgttggccgggcggagccgaacattctccgatatccaatttctgtatatctataatattattaacctccgcatacgcattacagttcttttctagcttggataccgcactaggtacatcgtctagatctattcctatttcctcagcgatagctcttctatccttttccggaagcaatgaaatcacttcaataaatgattcaaccatgagtgtgaaactaagtcgagaattactcatgcatttgttagttattcggagcgcgcaatttttaaactgtcctataacctctcctatatgaatagcacaagtgacattagtagggatagaatgttgagctaatttttgtaaataactatctataaaaagattatacaaagttttaaactctttagtttccgccatttatccagtctgagaaaatgtctctcataataaatttttccaagaaactaattgggtgaagaatggaaacctttaatctatatttatcacagtctgttttggtacacatgatgaattcttctaatgccgtactaaattcgatatctttttcgatttctggatatgtttttaataaagtatgaacaaagaaatggaaatcgtaataccagttatgtttaactttgaaattgttttttattttcttgttaatgattccagccacttgggaaaagtcaaagtcgtttaatgccgatttaatacgttcattaaaaacaaactttttatcctttagatgaattattattggttcattggaatcaaaaagtaagatattatcgggtttaagatctgcgtgtaaaaagttgtcgcagcatggtagttcgtagattttaatgtataacagagccatctgtaaaaagataaactttatgtattgtaccaaagatttaaatcctaatttgatagctaactcggtatctactttatctgccgaatacagtgctaggggaaaaattataatgtttcctctttcgtattcgtagttagttctcttttcatgttcgaaaaagtgaaacatgcggttaaaatagtttataacattaatattactgttaataactgccgggtaaaagtgggatagtaatttcacgaatttgatactgtcctttctctcgttaaacgcctttagaaaaactttagaagaatatctcaatgatagttcctgaccatccatagtttgtatcaataatagcaacatatgaagaacacgtttatacagagtatgtaaaaatgttaatttatagtttaatcccatggcccacgcacacacgattaattttttttcatctccctttagattgttgtatagaaatttgggtactgtgaactccgccgtagtttccatgggactatataattttgtggcctcgaatacaaattttactacatagttatctatcttaaaaactataccatatcctcctgtagatatgtgataaaaatcgtcgtttataggataaaatcgtttatccttttgttggaaaaaggatgaattaatgtaatcattctcttctatctttagtagtgtttccttattaaaattcttaaaataatttaacaatctaactgacggagcccaattttggtgtaaatctaattgggacattatattgttaaaatacaaacagtctcctaatataacagtatctgataatctatggggagacatccattgatattcaggggatgaatcattggcaacacccatttattgtacaaaaagccccaatttacaaacgaaagtccaggtttgatagagacaaactattaactattttgtctctgtttttaacacctccacagtttttaatttctttagtaatgaaattattcacaatatcagtatcttctttatctaccagagattttactaacttgataaccttggctgtctcattcaatagggtagtaatatttgtatgtgtgatattgatatctttttgaattgtttcttttagaagtgattctttgatggtgccagcatacgaattacaataatgcagaaactcggttaacatgcaggaattatagtaagccaattccaattgttgcctgtgttgtattagagtgtcaatatgagcaatggtgtccttgcgtttctctgatagaatgcgagcagcgattttggcgttatcatttgacgatatttctggaatgacgaatcctgtttctactaactttttggtaggacaaagtgaaacaatcaagaagatagcttctcctcctatttgtggaagaaattgaactcctctagatgatctactgacgatagtatctccttgacagatattggaccgaattacagaagtacctggaatgtaaagccctgaaaccccctcattttttaagcagattgttgccgtaaatcctgcactgtgaccaagatagagagctcctttggtgaatccatctctatgtttcagtttaaccaagaaacagtcagctggtctaaaatttccatctctatctaatacagcatctaacttgatgtcaggaactatgaccggtttaatgttatatgtaacattgagtaaatccttaagttcataatcatcactgtcatcagttatgtacgatccaaacaatgtttctactggcatagtggatacgaagatgctatccatcagaatgtttccctgattagtattttctatatagctattcttctttaaacgattttccaaatcagtaactatgttcatttttttaggagtaggacgcctagccagtatggaagaggattttctagatcctctcttcaacatctttgatctcaatggaatgcaaaaccccatagtgaaacaaccaacgataaaaataatattgtttttcactttttataattttaccatctgactcatggattcattaatatctttataagagctactaacgtataattctttataactgaactgagatatatacaccggatctatggtttccataattgagtaaatgaatgctcggcaataactaatggcaaatgtataaaacaacgaaattatactagagttgttaaagttaatattttctatgagctgttccaataaattatttgttgtgactgcgttcaagtcataaatcatcttgatactatccagtaaacagtctttaagttctggaatattatcatcccattgtaaagcccctaattcgactatcgaatatcctgctctgatagcagtttcaatatcgacggacgtcaatactgtaataaaggtggtagtattgtcatcatcgtgataaactacgggaatatggtcgttagtaggtacggtgactttacacaacgcgatatataactttccttttgtaccatttttaacgtagttgggacgtcctgcagggtattgttttgaagaaatgatatcgagaacagatttgatacgatatttgttggattcctgattattcactataatataatctagacagatagatgattcgataaatagagaaggtatatcgttggtaggataatacatccccattccagtattctcggatactctattgatgacactagttaagaacatgtcttctattctagaaaacgaaaacatcctacatggactcattaaaacttctaacgctcctgattgtgtctcgaatgcctcgtacaaggatttcaaggatgccatagattctttgaccaacgatttagaattgcgtttagcatctgatttttttattaaatcgaatggtcggctctctggtttgctaccccaatgataacaatagtcttgtaaagataaaccgcaagaaaatttatacgcatccatccaaataaccctagcaccatcggatgatattaatgtattattatagattttccatccacaattattgggccagtatactgttagcaacggtatatcgaatagattactcatgtaacctactagaatgatagttcgtgtactagtcataatatctttaatccaatctaagaaatttaaaattagattttttacactgttaaagttaacaaaggtattacccggatacgtggatatcatatatggcattggtccattatcagtaatagctccataaactgatacggcgatggtttttatatgtgtttgatctaacgaggaagaaattcgcgcccacaattcatctctagatatgtatttaatatcaaacggtaacacatcaatttcgggacgcgtatatgtttctaaatttttaatccaaatataatgatgacctatatgccctattatcatactgtcaactatagtacacctagagaacttacgatacatctgtttcctataatcgttaaattttacaaatctataacatgctaaaccttttgacgacaaccattcattaatttctgatatggaatctgtattctcgataccgtattgttctaaagccagtgctatatctccctgttcgtgggaacgctttcgtataatatcgatcaacggataatctgaagtttttggagaataatatgactcatgatctatttcgtccataaacaatctagacataggaattggaggcgatgatcttaattttgtgcaatgagtcgtcaatcctataacttctaatattgtaatattcatcatcgacataacactatctatgttatcatcgtatattagtataccacggccttcttcatttcgtgccaaaataatatacagtcttaaataattacgcaatatctcaatagtttcataattgttagctgttttcatcaaggtttgtatcctgtttaacatgatggcgttctataacgtctctattttctatttttaattttttaaatttttaacgatttactgtggctagatacccaatctctctcaaatatttttttagcctcgcttacaagctgtttatctatactattaaaactgacgaatccgtgattttggtaatgggttccgtcgaaatttgccgaagtgatatgaacatattcgtcgtcgactatcaacaattttgtattattctgaatagtgaaaaccttcacagatagatcattttgaacacacaacgcgtctagacttctggcggttgccatagaatatacgtcgttcttatcccaattaccaactagaagtctgatcttaactcctctattaatggctgcttctataatggagttgtaaatgtcaggccaatagtagctattaccgtcgacacgtgtagtgggaactatggccaaatgttcaatatctatactagtcttagccgacttgagtttatcaataactacatcagtgtctagatctctagaatatcccaataggtgttctggagaatcagtaaagaacactccacctataggattcttaatatgatacgcagtgctaactggcagacaacaagccgcagagcataaattcaaccatgaattttttgcgctattaaaggctttaaaagtatcaaatcttctacgaagatctgtggccagcgggggataatcagaatatacacctaacgttttaatcgtatgtatagatcctccagtaaatgacgcgtttcctacataacatctttcatcatctgacacccaaaaacaaccgagtagtagtcccacattattttttttatctatattaacggttataaaatttatatccgggcagtgactttgtagctctcccagatttcttttccctcgttcatctagcaaaactattattttaatccctttttcagatgcctcttttagtttatcaaaaataagcgcgcccctagtcgtactcagaggattacaacaaaaagatgctatgtatatatatttcttagctagagtgataatttcgttaaaacattcaaatgttgttaaatgatcggatctaaaatccatattttctggtagtgtttctaccagcctacattttgctcccgcaggtaccggtgcaaatggccacatttagttaacataaaaacttatacatcctgttctatcaacgattctagaatatcatcggctatatcgctaaaattttcatcaaagtcgacatcacaacctaactcagtcaatatattaagaagttccatgatgtcatcttcgtttatttctatatccgtatccattgtagattgttgaccgattatcgagtttaaatcattactaatactcaatccttcagaatacaatctgtgtttcattgtaaatttataggcggtgtatttaagttggtagattttcaattatgtatcaatatagcaacagtagttcttgctcctccttgattctagcatcctcttcattattttcttctacgtacataagcatgtccaatacgttagacaacacaccgacgatggcggccgccacagacacgaatatgactagaccgatgaccatttaaaaacccctctctagctttcacttaaactgtatcgattattcttttagaacatgtataatataaaaacattattctatttcgaatttaggcttccaaaaatttttcatccgtaaaccgataataatatatatagacttgttaatagtcggaataaatagattaatgcttaaactatcatcatctccacgattagagatacaatatttacattctttttgctgtttcgaaactttatcaatacacgttaatacaaacccaggaaggagatattgaaactgaggctgttgaaaatgaaacggtgaatacaataattcagataatgtaaaatcatgattccgtattctgatgatattagaactgctaatggatgtcgatggtatgtatctaggagtatctattttaacaaagcatcgatttgctaatatacaattatcattttgattaattgttattttattcatattcttaaaaggtttcatatttatcaattcttctacattaaaaatttccatttttaatttatgtagccccgcaatactcctcattacgtttcattttttgtctataatatccattttgttcatctcggtacatagattatccaattgagaagcgcatttagtagttttgtacattttaagtttattgacgaatcgtcgaaaactagttatagttaacattttattatttgataccctgatattaatacccctgccgttactattatttataactgatgtaacccacgtaacattagaattaattatcgatagtaatgcatcgacgcttccaaaattgtctattataaactcaccgataatttttttattgcatgttttcatattcattaggattatcaaatctttaatcttattacgattgtatgcgttgatattacaagacgtcattctaaaagacggaggatctccatcaaatgccagacaatcacgtacaaagtacatggaaataggttttgttctattgcgcatcatagattcatatagaacacccatagaaatactaatttgttttactctataaaatactaatgcatctatttcatcgttttgtataacgtctttccaagtgccaaattccaaatttttttcattgatagtaccaaattcttctatctctttaactacttgcatagataggtaattacagtgatgcctacatgccgttttttgaaactgaatagatgcgtctagaagcgatgctacactagtcacaatcaccactttcatatttagaatatatgtatgtaaaaatatagtagaatttcattttgtttttttctatgctataaatgaattctcattttgcatctgctcatactccgttttatatcaataccaaagaaggaagatatctggttctaaaagccgttaaagtatgcgatgttagaactgtagaatgcgaaggaagtaaagcttcctgcgtactcaaagtagataaaccctcatcgcccgcgtgtgagagaagaccttcgtccccgtccagatgcgagagaatgaataaccctggaaaacaagtcccgtttatgaggacggacatgctacaaaatatgttcgcggctaatcgcgataatgtagcttctagacttttgtcctaaaatactattatatccttttcgatattaataaatccgtgtcgtccaggttttttatctctttcagtatgtgaatagataggtattttatctctattcatcatcgaatttaagagatccgataaacattgtttgtattctccagatgtcagcatctgatacaacaatatatgtgcacataaacctctggcacttatttcatgtaccttccccttatcactaaggagaatagtatttgagaaatatgtatacatgatattatcatgaattagatatacagaatttgtaacactctcgaaatcacacgatgtgtcggcgttaagatctaatatatcactcgataacacattttcatctagatacactagacattttttaaagctaaaatagtctttagtagtgacagtaactatgcgattattttcatcgatgatacatttcatcggcatattattacgcttaccatcaaagactataccatgtgtatatctaacgtattctagcatggttgccatacgtgcattaaacttttcaggatctttggatagatcttccaatctatctatttgagaaaacatttttatcatgttcaatagttgaaacgtcggatccactatatagatattatctataaagattttaggaactacgttcatggtatcctggcgaatattaaaactatcaatgatatgattatcgttttcatcttttatcaccatatagtttctaagatatgggattttacttaatataatattatttcccgtgataaattttattagaaaggccaaatctataagaaaagtcctagaattagtctgaagaatatctatatcgccgtaccgtatatttggattaattagatatagagaatatgatccgtaacatatacaacttttattatggcgtctaagatattcttccatcaacttattaacatttttgactagggaagatacattatgacgtcccattacttttgccttgtctattactgcgacgttcatagaatttagcatatctcttgccaattcttccattgatgttacattataagaaattttagatgaaattacatttggagctttaatagtaagaactcctaatatgtccgtgtatgtggtcactaatacagattgtagttctataatcgtaaataatttacctatattatatgtttgagtctgtttagaaaagtagctaagtatacgatcttttatttctgatgcagatgtatcaacatcggaaaaaaatctttttttattcttttttactaaagatacaaatatgtctttgttaaaaacagttattttctgaatatttctagcttgtaattttaacatatgatattcgttcacactaggtactctgcctaaataggtttctataatctttaatgtaatattaggaagagtattctgatcaggattcctattcattttgaggatttaaaactctgattattgtctaatatggtctcaacacaaactttttcacagagcgatagagtttttgataactcgtttttcttaagaaatataaaactactgtttccagagctcgctctatcttttattttatctaattcgatacaaactcctgatactggttcagaaagtaattcattaattttcagtcctttatagaagatatttaatatagataatacaaaattttcagttcttgatatcgatctgattgatcctagaactagatatattaataacgtgctcattaggcagtttatggcagcttgataattagatatagtatattccagttcatatttattagataccgcattgcccagattttgatattctatgaattcctctgaaaataaatccaaaataactagacattctattttttgtggattagtgtactctcttccctctatcatgttcactactggtgtccacgatgataaatatctagagggaatataatatagtccataggatgccaatctagcaatgtcgaataactgtaatttgattcttcgttcttcattatgaattgattcttgaggtataaacctaacacaaattatattattagacttttcgtatgtaatgtctttcatgttataagtttttaatcctggaatagaatctattttaatgaggcttttaaacgcagagttctccaacgagtcaaagcataatactctgttgtttttcttatatacgatgttacgattttcttctttgaatggaataggtttttgaattagtttataattacaacataatagataaggaagtgtgcaaatagtacgcggaaaaaacataatagctcccctgttttcatccatggttttaagtaaatgatcactggcttctttagtcaatggatattcgaacattaaccgtttcatcatcattggacagaatccatatttcttaatgtaaagagtgatcaaatcattgtgtttattgtaccatcttgttgtaaatgtgtattcggttatcggatctgctcctttttctattaaagtatcgatgtcgatctcgtctaagaattcaactatatcgacatatttcatttgtatacacataaccattactaacgtagaatgtataggaagagatgtaacgggaacagggtttgttgattcgcaaactattctaatacataattcttctgttaatacgtcttgcacgtaatctattatagatgccaagatatctatataattattttgtaagatgatgttaactatgtgatctatataagtagtgtaataattcatgtatttcgatatatgttccaactctgtctttgtgatgtctagtttcgtaatatctatagcatcctcaaaaaatatattcgcatatattcccaagtcttcagttctatcttctaaaaaatcttcaacgtatggaatataataatctattttacctcttctgatatcattaatgatatagtttttgacactatcttctgtcaattgattcttattcactatatctaagaaacggatagcgtccctaggacgaactactgccattaatatctctattatagcttctggacataattcatctattataccagaattaatgggaactattccgtatctatctaacatagttttaagaaagtcagaatctaagacctgatgttcatatattggttcatacatgaaatgatctctattgatgatagtgactatttcattctctgaaaattggtaactcattctatatatgctttccttgttgatgaaggatagaatatactcaatagaatttgtaccaacaaactgttctcttatgaatcgtatatcatcatctgaaataatcatgtaaggcatacatttaacaattagagacttgtctcctgttatcaatatactattcttgtgataatttatgtgtgaggcaaatttgtccacgttctttaattttgttatagtagatatcaaatccaatggagctacagttcttggcttaaacagatatagtttttctggaacgaattctacaacattattataaaggactttgggtagataagtgggatgaaatcctattttaattaatgcgatagccttgtcctcgtgcagatatccaaacgcttttgtgatagtatggcattcattgtctagaaacgctctacgaatatctgtgacagatatcatctttagagaatatactagtcgcgttaatagtactacaatttgtattttttaatctatctcaataaaaaaattaatatgtatgattcaatgtataactaaactactaactgttattgataactagaatcagaatctaatgatgacgtaaccaagaagtttatctactgccaatttagctgcattatttttagcatctcgtttagattttccatctgccttatcgaatactcttccgtcgatgtctacacaggcataaaatgtaggagagttactaggccccactgattcaatacgaaaagaccaatctctcctagtaatttggcagtactcattaataacggtgacagggttagcacctttccaatcaataatttttttagccggaataacatcatcaaaagacttatgatcctctctcattgatttttcgcgggatacatcatctattatggcgtcagccataacatcagcatccggcttatccgcctccgttgtcataaaccaacgaggaggaatatcgtcggagctgtacaccatagcactacgttgaagatcgtacagagctttattaacttctcgcttctccatattaagttgtctagttagttgtgcagcagtagctccttcgattccaatggttttaatagcctcacacacaatctctgcgttagaacgttcgtcgatatagattttagacatttttagagagaactaacacaaccagcaataaaactgaacctactttatcatttttttattcatcatcctctggtggttcgtcgttcctatcgaatgtggatctgattaacccgtcatctataggtgatgctggttctggagattctggaggagatggattattatctggaagaatctctgttatttccttgttttcatgtatcgattgcgttgtaacattaagattgcgaaatgctctaaatttgggaggcttaaagtgttgtttgcaatctctacacgcatgtctaactagtggaggttcgtcagcggctctagtttgaatcatcatcggcgtagtattcctacttttacagttaggacacggtgtattgtatttctcgtcgagaacgttaaaataatcgttgtaactcacatcctttattttatctatattgtattctactcctttcttaatgcattttataccgaataagagatagcgaaggaattctttttcggtgccgctagtacccttaatcatatcacatagtgttttatattccaaatttgtggcaatagacggtttatttctatacgatagtttgtttctggaatcctttgagtattctataccaatattattctttgattcgaatttagtttcttcgatattagattttgtattacctatattcttgatgtagtactttgatgatttttccatggcccattctattaagtcttccaagttggcatcatccacatattgtgatagtaattctcggatatcagtagcggctaccgccattgatgtttgttcattggatgagtaactactaatgtatacattttccatttataacacttatgtattaactttgttcatttatattttttcattattatgttgatattaacaaaagtgaatatatatgttaataattgtattgtggttatacggctacaatttcataatgagtggaagtcagtgtccgatgatcaatgacgatagctttactctgaaaagaaagtatcaaatcgatagtgcggagtcaacaataaaaatggataagaagaggataaagtttcagaatagagccaaaatggtaaaagaaataaatcagacaataagagcagcacaaactcattacgagacattgaaactaggatacataaaatttaagagaatgattaggactactactctagaagatatagcaccatctattccaaataatcagaaaacttataaactattctcggacatttcagccatcggcaaagcatcacagaatccgagtaagatggtatatgctctgctgctttacatgtttcccaatttgtttggagatgaccatagattcattcgttatagaatgcatccaatgagtaaaatcaaacacaagatcttctctcctttcaaacttaatcttattagaatattagtggaagaaagattctataataatgaatgcagatctaataaatggagaataattggaacacaagttgataaaatgttgatagctgaatctgataaatatacaatagatgcaaggtataacctaaaacccatgtatagaatcaagggaaaatctgaagaagataccctcttcatcaaacagatggtagaacaatgtgtgacatcccaggaattggtggaaaaagtgttgaagatactgtttagagatttgttcaagagtggagaatacaaagcatacagatacgatgatgatgtagaaaatggatttattggattggatacactaaaattaaacattgttcatgatatagttgaaccatgtatgcctgttcgtaggccagtggctaagatactgtgtaaagaaatggtaaataaatactttgagaatccgctacatattattggtaaaaatcttcaagagtgcattgactttgttagtgaataggcatttcatctttctccaatactaattcaaattgttaaattaataatggatagtataaatagttattagtgataaaatagtaaaaataattattagaataagagtgtagtatcatagataactctcttctataaaaatggattttattcgtagaaagtatcttatatacacagtagaaaataatatagattttttaaaggatgatacattaagtaaagtaaacaattttaccctcaatcatgtactagctctcaagtatctagttagcaattttcctcaacacgttattactaaggatgtattagctaataccaatttttttgttttcatacatatggtacgatgttgtaaagtgtacgaagcggttttacgacacgcatttgatgcacccacgttgtacgttaaagcattgactaagaattatttatcgtttagtaacgcaatacaatcgtacaaggaaaccgtgcataaactaacacaagatgaaaaatttttagaggttgccgaatacatggacgaattaggagaacttataggcgtaaattatgacttagttcttaatccattatttcacggaggggaacccatcaaagatatggaaatcatttttttaaaactgtttaagaaaacagacttcaaagttgttaaaaaattaagtgttataagattacttatttgggcatacctaagcaagaaagatacaggcatagagtttgcggataatgatagacaagatatatatactctatttcaacaaactggtagaatcgtccatagcaatctaacagaaacgtttagagattatatctttcccggagataagactagctattgggtgtggttaaacgaaagtatagctaatgatgcggatatcgttcttaatagacacgccattaccatgtatgataaaattcttagttatatatactctgagataaaacaaggacgcgttaataaaaacatgcttaagttagtttatatctttgagcctgaaaaagatatcagagaacttctgctagaaatcatatatgatattcctggagatatcctatctattattgatgcaaaaaacgacgattggaaaaaatattttattagtttttataaagctaattttattaacggtaatacatttattagtgatagaacgtttaacgaggacttattcagagttgttgttcaaatagatcccgaatatttcgataatgaacgaattatgtctttattctctacgagtgctgcggacattaaacgatttgatgagttagatattaataacagttatatatctaatataatttatgaggtgaacgatatcacattagatacaatggatgatatgaagaagtgtcaaatctttaacgaggatacgtcgtattatgttaaggaatacaatacatacctgtttttgcacgagtcggatcccatggtcatagagaacggaatactaaagaaactgtcatctataaaatccaagagtagacggctgaacttgtttagcaaaaacattttaaaatattatttagacggacaattggctcgtctaggtcttgtgttagatgattataaaggagacttgttagttaaaatgataaaccatcttaagtctgtggaggatgtatccgcattcgttcgattttctacagataaaaaccctagtattcttccatcgctaatcaaaactattttagctagttataatatttccatcatcgtcttatttcaaaggtttttgagagataatctatatcatgtagaagaattcttggataaaagcatccatctaaccaagacggataagaaatatatacttcaattgataagacacggtagatcatagaacagaccaaatatattattaataatttgtatatacatagatataattatcacatattaaaaattcacacatttttgataaatgggaactgctgcaacaattcagactcccaccaaattaatgaataaagaaaatgcagaaatgattttggaaaaaattgttgatcatatagttatgtatattagtgacgaatcaagtgattcagaaaataatcctgaatatattgattttcgtaacagatacgaagactatagatctctcattataaaaagtgatcacgagtttgtaaagctatgtaaaaatcatgcagagaaaagttctccagaaacgcaacaaatgattatcaaacacatatacgaacaatatcttattccagtatctgaagtactattaaaacctataatgtccatgggtgacataattacatataacggatgtaaagacaatgaatggatgctagaacaactctctaccctaaactttaacaatctccgcacatggaactcatgtagcataggcaatgtaacgcgtctgttttatacattttttagttatctgatgaaagataaactaaatatataagtataatcccattctaatactttaacctgatgtattacctgcatcttattagaatattaacctaactaaaagacataacataaaaactcattacatagttgataaaaagcggtaggatataaatattatggctgccaccgttccgcgttttgacgacgtgtacaaaaatgcacaaagaagaattctagatcaagaaacattttttagtagaggtctaagtagaccgttaatgaaaaacacatatctatttgataattacgcgtatggatggataccagaaactgcaatttggagtagtagatacgcaaacttagatgcaagtgactattatcccatttcgttgggattacttaaaaagttcgagtttctcatgtctctatataaaggtcctattccagtatacgaagaaaaagtaaatactgaattcatagccaatggatcgttctctggtagatacgtatcatatcttcgaaagttttctgctcttccaacaaacgagtttattagttttttgttactgacttccattccaatctataatatcttgttctggtttaaaaatactcagtttgatattactaaacacacattattcagatacgtctatacagataatgccaaacacctggcgttggctaggtatatgcatcaaacaggagactataagcctttgtttagtcgtctcaaagagaattatatatttaccggtcccgttccaataggtatcaaagatatagatcaccctaatcttagtagagcaagaagtccatccgattatgagacattagctaatattagtactatattgtactttaccaagtatgatccggtattaatgtttttattgttttacgtacctgggtattcaattactacaaaaattactccagccgtagaatatctaatggataaactgaatctaacaaagagcgacgtacaactgttgtaaattattttatgcttcgtaaaatgtaggttttgaaccaaacattctttcaaagaatgagatgcataaaactttattatccaatagattgactatttcggacgtcaatcgtttaaagtaaacttcgtaaaatattctttgatcactgccgagtttaaaacttctatcgataattgtctcatatgttttaatatttacaagttttttggtccatggtacattagccggacaaatatatgcaaaataatatcgttctccaagttctatagtttctggattatttttattatattcagtaaccaaatacatattagggttatctgcggatttataatttgagtgatgcattcgactcaacataaataattctagaggagacgatctactatcaaattcggatcgtaaatctgtttctaaagaacggagaatatctatacatacctgattagaattcatccgtccttcagacaacatctcagacagtctggttttgtacatcttaatcatattcttatgaaacttggaaacatctcttctagtttcactagtacctttattaattctctcaggtacagattttgaattcgacgatgccgagtatttcatcgttgtatatttcttcttcgattgcataatcagattcttatataccgcctcaaactctattttaaaattattaaacaatactctactattaatcagtcgttctaactctttcgctatttctatagacttatctacatcttgactgtctatctctgtaaacacggagtcggtatctccatacacgctacgaaaacgaaatctgtaatctataggcaacgatgttttcacaatcggattaatatctctatcgtccatataaaatggattacttaatggattggcaaaccgtaacataccgttagataactctgctccatttagtaccgattctagatacaagatcattctacgtcctatggatgtgcaactcttagccgaagcgtatgagtatagagcactatttctaaatcccatcagaccatatactgagttggctactatcttgtacgtatattgcatggaatcataaatggccttttcagttgaactggtagcctgttttaacatctttttatatctggctctctctgccaaaaatgttcttaatagtctaggaatggttccttctatcgatctatcgaaaattgctatttcagagatgaggttcggtagtctaggttcacaatgaaccgtaatatatctaggaggtggatatttctgaagcaatagctgattatttatttcttcttccaatctattggtactaacaacgacaccgactaatgtttccggagatagatttccaaagatacacacattaggatacagactgttataatcaaagattaatacattattactaaacattttttgttttggagcaaataccttaccgccttcataaggaaacttttgttttgtttctgatctaactaagatagttttagtttccaacaatagctttaacagtggacccttgatgactgtactcgctctatattcgaataccatggattgaggaagcacatatgttgacgcacccgcgtctgtttttgtttctactccataatactcccacaaatactgacacaaacaagcatcatgaatacagtatctagccatatctaaagctatgtttagattataatccttatacatctgagctaaatcaacgtcatcctttccgaaagataatttatatgtatcattaggtaaagtaggacataatagtacgactttaaatccattttcccaaatatctttacgaattactttacatataatatcctcatcaacagtcacataattacctgtggttaaaacctttgcaaatgcagcggctttgcctttcgcgtccgtagtatcgtcaccgatgaacgtcatttctctaactcctctatttaatactttacccatgcaactgaacgcgttcttggatatagaatccaatttgtacgaatccaatttttcagatttttgaatgaatgaatatagatcgaaaaatatagttccattattgttattaacgtgaaacgtagtattggccatgccgcctactcccttatgactagactgatttctctcataaatacagagatgtacagcttcctttttgtccggagatctaaagataatcttctctcctgttaataactctagacgattagtaatatatctcagatcaaagttatgtccgttaaaggtaacgacgtagtcgaacgttagttccaacaattgtttagctattcgtaacaaaactatttcagaacatagaactagttctcgttcgtaatccatttccattagtgactgtatcctcaaacatcctctatcgacggcttcttgtatttcctgttccgttaacatctcttcattaatgagcgtaaacaataatcgtttaccacttaaatcgatataacagtaacttgtatgcgagattgggttaataaatacagaaggaaacttcttatcgaagtgacactctatatctagaaataagtacgatcttgggatatcgaatctaggtatttttttagcgaaacagttacgtggatcgtcacaatgataacatccattgttaatctttgtcaaatattgctcgtccaacgagtaacatccgtctggagatatcccgttagaaatataaaaccaactaatattgagaaattcatccatggtggcattttgtatgctgcgtttctttggctcttctatcaaccacatatctgcgacggagcattttctatctttaatatctagattataacttattgtctcgtcaatgtctatagttctcatctttcccaacggcctcgcattaaatggaggaggagacaatgactgatatatttcgtccgtcactacgtaataaaagtaatgaggaaatcgtataaatacggtctcaccatttcgacatctggatttcagatataaaaatctgttttcaccgtgactttcaaaccaattaatgcaccgaacatccatttatagaatttagaaatatattttcatttaaatgaatcccaaacattggggaagagccgtatggaccattatttttatagtactttcgcaagcgggtttagacggcaacatagaagcgtgtaaacgaaaactatatactatagtcagcactcttccatgtcctgcatgtagacggcacgcgactatcgctatagaggacaataatgtcatgtctagcgatgatctgaattatatttattattttttcatcagattatttaacaatttggcatctgatcccaaatacgcgatcgatgtgacaaaggttaaccctttataaacttaacccattataaaacttatgattagtcacaactgaaataaccgcgtgattattttttggtataattctacacggcatggtttctgtaactatgaattcaacccccgttacattagtgaaatctttaacaaacagcaagggttcgtcaaagacataaaactcattgtttacaatcgaaatagaccccctatcacacttaaaataaaaaatatccttatcctttaccaccaaataaaattctgattggtcaatgtgaatgtattcacttaacagttccacaaatttatttattaactccgaggcacatacatcgtcggtattttttatggcaaactttactcttccagcatccgtttctaaaaaaatattaacgagttccatttatatcatccaatattattgaaatgacgttgatggacagatgatacaaataagaaggtacggtacctttgtccaccatctcctccaattcatgctctattttgtcattaactttaatgtatgaaaacagtacgccacatgcttccatgacagtgtgtaacactttggatacaaaatgtttgacattagtataattgttcaagactgtcaatctataatagatagtagctataatatattctatgatggtattgaagaagatgacaaccttggcatattgatcatttaacacagacatggtatcaacagatagcttgaatgaaagagaatcagtaattggaataagcgtcttctcgatagagtgtccgtataccaacatgtctgatattttgatgtattccattaaattatttagttttttctttttattttcgttaaacagcatttctgtcaacggaccccaacatcgttgaccgattaagttttgattgatttttccgtgtaatgcgtatctagtcagatcgtatagcctatccaataatccatcatctgtgcgtagatcacatcgtacactttttaattctctatagaagagcgacagacatctggagcaattacagacagcaatttctttattctctacagatgtaagatacttgaagacattcctatgatgatgcagaattttggataacacggtattgatggtatctgttaccataattcctttgatggctgatagtgtcagagcacaagatttccaatctttgacaatttttagcaccattatctttgttttgatatctatatcagacagcatggtgcgtctgacaacacagggattaagacggaaagatgaaatgattctctcaacatcttcaatggataccttgctattttttctggcattatctatatgtgcgagaatatcctctagagaatcagtatcctttttgatgatagtggatctcaatgacatgggacgtctaaaccttcttattttatcaccagattgcatggtgatttgtcttctttcttttatcataatgtaatctctaaattcatcggcaaattgtctatatctaaaatcataatatgagatgtttacctctacaaatatctgttcgtccaatgttagagtatctacatcagttttgtattccaaattaaacatggcaacggatttaattttatattcctctattaagtcctcgtcgataataacagaatgtagataatcatttaatccatcgtacatggttggaagatgcttgttgacaaaatctttaattgtcttgatgaaggtgggactatatctaacatcttgattaataaaatttataacattgtccataggatactttgtaactagttttatacacatctcttcatcggtaagtttagacagaatatcgtgaacaggtggtatattatattcatcagatatacgaagaacaatgtccaaatctatattgtttaatatattatatagatgtagcgtagctcctacaggaatatctttaactaagtcaatgatttcatcaaccgttagatctattttaaagttaatcatataggcattgatttttaaaaggtatgtagccttgactacattctcattaattaaccattccaagtcactgtgtgtaagaagattatattctatcataagcttgactacatttggtcccgataccattaaagaattcttatgatataaggaaacagcttttaggtactcatctactctacaagaattttggagagccttaacgatatcagtgacgtttattatttcaggaggaaaaaacctaacattgagaatgtcggagttaatagcttccagatacagtgattttggcaatagtccgtgtaatccataatccagtaacacgagctggtgcttgctagacaccttttcaatgtttaatttttttgaaataagctttgataaagccttcctcgcaaattccggatacatgaacatgtcggcgacatgattaagtattgttttttcattatttttatattttctcaacaagttctcaataccccaatagatgatagaatatcacccaatgcgtccatgttgtctatttccaacaggtcgctatatccaccaatagaagtttttccaaaaaagattctaggaacagttctaccaccagtaatttgttcaaaatagtcacgcaattcattttcgggtttaaattctttaatatcgacaatttcatacgctcctcttttgaaactaaacttatttagaatatccagtgcatttctacaaaaaggacatgtatacttgacaaaaattgtcactttgttattggccaacctttgttgtacaaattcctcggccattttaatatttaagtgatataaaactatctcgacttatttaactctttagtcgagatatatggacgcagatagctatatgatagccaactacagaaggcaaacgctataaaaaacataattacgacgagcatatttataaatatttttattcagcattacttgatatagtaatattaggcacagtcaaacattcaaccactctcgatacattaactctctcattttctttaacaaattctgcaatatcttcgtaaaaagattcttgaaactttttagaatatctatcgactctagatgaaatagcgttcgtcaacatactatgttttgtatacataaaggcgcccattttaacagtttctagtgacaaaatgctagcgatcctaggatcctttagaatcacatagattgacgattcgtctctcttagtaactctagtaaaataatcatacaatctagtacgcgaaataatattatccttgacttgaggagatctaaacaatctagttttgagaacatcgataagttcatcgggaatgacatacatactatctttaatagaactcttttcatccagttgaatggattcgtccttaaccaactgattaatgagatcttctattttatcattttccagatgatatgtatgtccattaaagttaaattgtgtagcgcttctttttagtctagcagccaatactttaacatcactaatatcgatatacaaaggagatgatttatctatggtattaagaattcgtttttcgacatctgtcaaaaccaattcctttttgcctgtatcatccagttttccatcctttgtaaagaaattattttctactagactattaataagactgataaggattcctccataattgcacaatccaaactttttaacaaaactagactttacaagatctacaggaatgcgtacttcaggtttcttagcttgtgattttttcttttgtggacattttcttgtgaccaactcatctaccatttcattgattttagcagtgaaataagctttcaatgcacgggcactgatactattgaaaacgagttgatcttcaaattccgccatttaagttcaccaaacaacttttaaatacaaatatatcaatagtagtagaataagaactataaaaaaaataataattaaccaataccaaccccaacaaccggtattattagttgatgtgactgttttctcatcacttagaacagatttaacaatttctataaagtctgtcaaatcatcttccggagaccccataaatacaccaaatatagcggcgtacaacttatccatttatacattgaatattggcttttctttatcgctatcttcatcatattcatcatcaatatcaacaagtcccagattacgagccagatcttcttctacattttcagtcattgatacacgttcactatctccagagagtccgataacgttagccaccacttctctatcaatgattagtttcttgagtgcgaatgtaatttttgtttccgttccggatctatagaaaactacaggtgtgataattgccttggccaattgtctttctcttttactgagtgattctagttcaccttctatagatctgagaatggatgattctccagtcgaaacatattctaccatggatccgtttaatttgttgatgaagatggattcatccttaaatgttttctctgtaatagtttccaccgaaagactatgcaaagaatttggaatgcgttccttgtgcttaatgtttccatagacggcttctagaagttgatacaacataggactagccgcggtaacttttatttttagaaagtatccatcgcttctatcttgtttagatttatttttataaagtttagtctctccttccaacataataaaagtggaagtcatttgactagataaactatcagtaagttttatagagatagacgaacaattagcgtattgagaagcatttagtgtaacgtattcgatacattttgcattagatttactaatcgattttgcatactctataacacccgcacaagtctgtagagaatcgctagatgcagtaggtcttggtgaagtttcaactctcttcttgattaccttactcatgattaaacctaaataattgtactttgtaatataatgatatatattttcactttatctcatttgagaataaaaatgtttttgtttaaccactgcatgatgtacagatttcggaatcgcaaaccaccagtggttttattttatccttgtccaatgtgaattgaatgggagcggatgcgggtttcgtacgtagatagtacattcccgtttttagaccgagactccatccgtaaaaatgcatactcgttagtttggaataactcggatctgctatatggatattcatagattgactttgatcgatgaaggctcccctgtctgcagccatttttatgatcgtcttttgtggaatttcccaaatagttttataaactcgcttaatatcttctggaaggtttgtattctgaatggatccaccatctgccataatcctattcttgatctcatcattccataattttctctcggttaaaactctaaggagatgcggattaactacttgaaattctccagacaatactctccgagtgtaaatattactggtatacggttccaccgactcattatttcccaaaatttgagcagttgatgcagtcggcataggtgccaccaataaactatttctaagaccgtatgttctgattttatcttttagaggttcccaattccaaagatccgacggtacaacattccaaagatcatattgtagaataccgttactggcgtacgatcctacatatgtatcgtatggtccttccttctcagctagttcacaactcgcctctaatgcaccgtaataaatggtttcgaagatcttcttatttagatcttgtgcttccaggctatcaaatggataatttaagagaataaacgcgtccgctaatccttgaacaccaataccgataggtctatgtctcttattagagatttcagcttctggaataggataataattaatatctataattttattgagatttctgacaattactttgaccacatccttcagtttgagaaaatcaaatcgcccatctattacaaacatgttcaaggcaacagatgccagattacaaacggctacctcattagcatccgcatattgtattatctcagtgcaaagattactacacttgatagttcctaaattttgttgattactctttttgttacacgcatccttataaagaatgaatggagtaccagtttcaatctgagattctataatcgctttccagacgactcgagcctttattatagatttgtatctcctttctctttcgtatagtgtatacaatcgttcgaactcgtctccccaaacattgtccaatccaggacattcatccggacacatcaacgaccactctccgtcatccttcactcgtttcataaagagatcaggaatccaaagagctataaatagatctctggttctatgttcctcgtttcctgtattctttttaagatcgaggaacgccataatatcagaatgccacggttccaagtatatggccataactccaggccgtttgtttcctccctgatctatgtatctagcggtgttattataaactctcaacattggaataataccgtttgatataccattggtaccggagatatagcttccactggcacgaatattactaattgatagacctattccccctgccattttagagattaatgcgcatcgttttaacgtgtcatagataccctctatgctatcatcgatcatgttaagtagaaaacagctagacatttggtgacgactagttcccgcattaaataaggtaggagaagcgtgcgtaaaccatttttcagaaagtagattgtacgtctcaatagctgagtctatatcccattgatgaattcctactgcgacacgcattaacatgtgctgaggtctttcaacgatcttgttgtttattttcaacaagtaggatttttccaaagttttaaaaccaaaatagttgtatgaaaagtctcgttcgtaaataataaccgagttgagtttatccttatatttgttaactatatccatggtgatacttgaaataatcggagaatgtttcccatttttaggattaacatagttgaataaatcctccatcacttcactaaatagtttttttgtttccttgtgtagatttgatacggctattctggcggctagaatggcataatccggatgttgtgtagtacaagtggctgctatttcggctgccagagtgtccaattctaccgttgttactccattatatattccttgaataaccttcatagctattttaataggatctatatgatccgtgtttaagccataacataattttctaatacgagacgtgattttatcaaacatgacattttccttgtatccatttcgtttaatgacaaacatttttgttggtgtaataaaaaaattatttaacttttcattaatagggatttgacgtatgtagcgtacaaaattatcgttcctggtatatagataaagagtcctatatatttgaaaatcgttacggctcgattaaactttaatgattgcatagtgaatatatcattaggatttaactccttgactatcagggcggcaccagaaattaccatcaaaagcattaatacagttatgccgatcgcagttagaacggttatagcatccaccatttatatctaaaaattagatcaaagaatatgtgacaaagtcctagttgtatactgagaattgacgaaacaatgtttcttacatatttttttcttattagtaactgacttaatagtaggaactggaaagctagacttgattattctataagtatagatacccttccaaataatattctctttgataaaagttccagaaaatgtagaattttttaaaaagttatcttttgctattaccaagattgtgtttagacgcttattattaatatgagtgatgaaatccacaccgcctctagatatcgcttttatttccacattagatggtaaatccaatagtgaaactatctttttaggaatgtatggactcgcgtttagaggagtgaacgtcttaggcgtcggaaaggatgattcatcaaacgaataaacaatttcacaaatggatgttaatgtattagtaggaaattttttgacgctagtggaattgaagattctaatggatgatgttctacctatttcatccgataacatgttaatttccgacaccaacggttttaatatttcgatgatatacggtagtctctctttcggacttatatagcttattccacaatacgagtcattatatactccaaaaaacaaaataactagtataaaatctgtatcgaatgggaaaaacgaaattatcgacataggtatagaatctggaacattgaacgtattaatacttaattctttttctgtggtaagtaccgataggttattgacattgtatggttttaaatattctataacttgagacttgatagatattagtgatgaattgaaaattatttttatcaccacgtgtgtttcaggatcatcgtcgacgcccgtcaaccaaccgaatggagtaaaataaatatcattaatatatgctctagatattagtatttttatcaatcctttgattatcatcttctcgtaggcgaatgattccatgatcaagagtgatttaagaacatcctccggagtattaatgggcttagtaaacagtccatcgttgcaataataaaagttatccaagttaaaggatattatgcattcgtttaaagatatcacctcatctgacggagacaattttttggtaggttttagagactttgaagctacttgtttaacaaagttattcatcgtcgtttactattctatttaattttgtagttaatttatcacatatcacattaattgactttttggtccatttttccatacgtttatattcttttaatcctgcgttatccgtttccgttatatccagggatagatcttgcaagttaaatagaatgctcttaaataatgtcatttttttatccgctaaaaatttaaagaatgtataaacttttttcaaagatttaaaacttttaggtggagttctagtacacaatatcataaacaaactaataaacatcccgcattcagattccaacagctgattaacttccacattaatacagcctattttcgctccaaatgtacattcgaaaaatctgaataaaacatcgatgtcacaatttgtattatccaatacagaatgtctgtgattcgtgttaaaaccatcggagaaggaatagaaataaaaattattatagtggtggaattcagttggaatattgcctccggagtcataaaaggatactaaacattgttttttatcataaattacacatttccaatgagacaaataacaaaatccaaacattacaaatctagaggtagaacttttaattttgtctttaagtatatacgataagatatgtttattcataaacgcgtcaaatttttcatgaatcgctaaggagtttaagaatctcatgtcaaattgtcctatataatccacttcggatccataagcaaactgagagactaagttcttaatacttcgattgctcatccaggctcctctctcaggctctattttcatcttgacgacctttggattttcaccagtatgtattcctttacgtgataaatcatcgattttcaaatccatttgtgagaagtctatcgccttagatactttttcccgtagtcgaggtttaaagaaatacgctaacggtatactagtaggtaactcaaagacatcatatatagaatggtaacgcgtctttaactcgtcggttaactctttcttttgatcgagttcgtcgctactattgggtctgctcaggtgccccgactctactagttccaacatcataccgataggaatacaagacactttgccagcggttgtagatttatcatatttctccactacatatccgttacaatttgttaaaaatttagatacatctatattgctacataatccagctagtgaatatatatgacataataaattggtaaatcctagttctggtattttactaattactaaatctgtatatctttccatttatcatggaaaagaatttaccagatatcttcttttttccaaactgcgttaatgtattctcttacaaatattcacaagatgaattcagtaatatgagtaaaacggaacgtgatagtttctcattggcggtgtttccagttataaaacatagatggcataacgcacacgttgtaaaacataaaggaatatacaaagttagtacagaagcacgtggaaaaaaagtatctcctccatcactaggaaaacccgcacacataaacctaaccgcgaagcaatatatatacagtgaacacacaataagctttgaatgttatagttttctaaaatgtataacaaatacagaaatcaattcgttcgatgagtatatattaagaggactattagaagctggtaatagtttacagatattttccaattccgtaggtaaacgaacagatactataggtgtactagggaataagtatccatttagcaaaattccattggcctcattaactcctaaagcacaacgagagatattttcagcgtggatttctcatagacctgtagttttaactggaggaactggagtgggtaagacgtcacaggtacccaagttattgctttggtttaattatttatttggtggattctctactctagataaaatcactgactttcacgaaagaccagtcattctatctcttcctaggatagctttagttagattgcatagcaataccattttaaaatcattgggatttaaggtactagatggatctcctatttctttacggtacggatctataccggaagaattaataaacaaacaaccaaaaaaatatggaattgtattttctacccataagttatctctaacaaaactatttagttatggcactcttattatagacgaagttcatgagcatgatcaaataggagatattattatagcagtagcgagaaagcatcatacgaaaatagattctatgtttttaatgactgccacgttagaggatgacagggaacggctaaaagtatttttacctaatcccgcatttatacatattcctggagatacactgtttaaaattagcgaggtatttattcataataagataaatccatcttccagaatggcatacatagaagaagaaaagagaaatttagttactgctatacagatgtatactcctcctgatggatcatccggtatagtctttgtggcatccgttgcacagtgtcacgaatataaatcatatttagaaaaaagattaccgtatgatatgtatattattcatggtaaggtcttagatatagacgaaatattagaaaaagtgtattcatcacctaatgtatcgataattatttctactccttatttggaatccagcgttactatacacaatgttacacacatttatgatatgggtagagtttttgtccccgctccttttggaggatcgcaacaatttatttctaaatctatgagagatcaacgaaaaggaagagtaggaagagttaatcctggtacatacgtctatttctatgatctgtcttatatgaagtctatacagcgaatagattcagaatttctacataattatatattgtacgctaataagtttaatctaacactccccgaagatttgtttataatccctacaaatttggatattctatggcgtacaaaggaatatatagactcgttcgatattagtacagaaacatggaataaattattatccaattattatatgaagatgatagagtatgctaaactttatgtactaagtcctattctcgctgaggagttggataactttgagaggacgggagaattaactagtattgtacgagaagccattttatctctaaatttacgaattaagattttaaattttaaacataaagatgatgatacgtatatacacttttgtaaaatattattcggtgtctataacggaacaaacgctactatatattatcatagacctctaacgggatatatgaatatgatttcagatactatatttgttcctgtagataataactaaaaatcaaactctaatgaccacatctttttttagagatgaaaaattttctacatctccttttgtagacacgactaaacattttgcagaaaaaagtttattagtgtttagataatcgtatacttcatcagtgtagatagtaaatgtgaacagataaaaggtattcttgctcaatagattggtaaattccatagaatatattaatcctttcttcttgagatcccacatcatttcaaccagagacgttttatccaatgatttacctcgtactataccacatacaaaactagattttgcagtgacgtcgtacctggtattcctaccaaacaaaattttacttttagttcttttagaaaattctaaggtagaatctctatttgccaatatgtcatctatggaattaccactagcaaaaaatgatagaaatatatattgatacatcgcagctggttttgatctactatactttaaaaacgaatcagattccataattgcctgtatatcatcagctgaaaaactatgttttacacgtattccttcggcatttctttttaatgatatatcttgtttagacaatgataaagttatcatgtccatgagagacgcgtctccgtatcgtataaatatttcattagatgttagacgcttcattaggggtatacttctataaggtttcttaatcagtccatcattggttgcgtcaagaactactatcggatgttgttgggtatctctagtgttacacatggccttactaaagtttgggtaaataactatgatatctctattaattatagatgcatatatttcattcgtcaaggatattagtatcgacttgctatcgtcattaatacgtgtaatgtaatcatataaatcatgcgatagccaaggaaaatttaaatagatgttcatcatataatcgtcgctataattcatattaatacgttgacattgactaatttgtaatatagcctcgccacgaagaaagctctcgtattcagtttcatcgataaaggataccgttaaatataactggttgccgatagtctcatagtctattaagtggtaagtttcgtacaaatacagaatccctaaaatattatctaatgttggattaatctttaccataactgtataaaatggagacggagtcataactattttaccgtttgtacttactggaatagatgaaggaataatctccggacatgctggtaaagacccaaatgtctgtttgaagaaatccaatgttccaggtcctaatctcttaacaaaaattacgatattcgatcccgatatcctttgcattctatttaccagcatatcacgaactatattaagattatctatcatgtctattctcccaccgttatataaatcgcctccgctaagaaacgttagtatatccatacaatggaatacttcatttctaaaatagtattcgttttctaattctttaatgtgaaatcgtatactagaaagggaaaaattatctttgagttttccgttagaaaagaaccacgaaactaatgttctgattgcgtccgattccgttgctgaattaatggatttacaccaaaaactcatataacttctagatgtagaagcattcgctaaaaaattagtagaatcaaaggatataagtagatgttccaacaagtgagcaattcccaagatttcatctatatcattctcgaatccgaaattagaaattcccaagtagatatcctttttcatccgatcgttgatgaaaatacgaactttattcggtaagacaatcatttactaaggagtaaaataggaagtaatgttcgtatgtcgttatcatcgtataaattaaaggtgtgttttttaccattaagtgacattataattttaccaatattggaattataatataggtgtatttgcgcactcgcgacggttgatgcatcggtaaatatagctgtatctaatgttctagtcggtatttcatcatttcgctgtctaataatagcgttttctctatctgtttccattacagctgcctgaagtttattggtcggataatatgtaaaataataagaaatacatacgaataacaaaaataaaataagatataataaagatgccatttagagatctaattttgttcaacttgtccaaattcctacttacagaagatgaggaatcgttggagatagtgtcttccttatgtagaggatttgaaatatcttatgatgacttgataacttactttccagataggaaataccataaatatatttataaagtatttgaacatgtagatttatcggaggaattaagtatggaattccatgatacaactttgcgagatttagtttatcttagattgtacaagtattccaagtgtatacggccgtgttataaattaggagataatctaaaaggcatagttgttataaaggacaggaatatttatattagggaagcaaatgatgacttgatagaatatctcctcaaggaatacactcctcagatttatacatattctaatgagcgcgtccccataactggttcaaaattaattctttgtggattttctcaagttacatttatggcgtatacaacgtcgcatataacaacaaataaaaaggtagatgttctcgtttccaaaaaatgtatagatgaactagtcgatccaataaattatcaaatacttcaaaatttatttgataaaggaagcggaacaataaacaaaatactcaggaagatattttattcggtaaccggtggccaaactccataggtagctttttctatttcggattttagaatttccaaattcaccagcgatttatcggttttggtgaaatccaaggatttattaatgtccacaaatgccatttgttttgtctgtggattgtatttgaaaatggaaacgatgtagttagatagatgcgctgcgaagtttcctattagggttccgcgcttcacgtcacccagcatacttgaatcaccatcctttaaaaaaaatgataagatatcaacatggagtatatcatactcggattttaattcttctactgcatcactgacattttcacaaatactacaatacggtttaccgaaaataatcagtacgttcttcatttatgggtatcaaaaacttaaaatcgttactgctggaaaataaatcactgacgatattagatgataatttatacaaagtatacaatggaatatttgtggatacaatgagtatttatatagccgtcgccaattgtgtcagaaacttagaagagttaactacggtattcataaaatacgtaaacggatgggtaaaaaagggagggcatgtaaccctttttatcgatagaggaagtataaaaattaaacaagacgttagagacaagagacgtaaatattctaaattaaccaaggacagaaaaatgctagaattagaaaagtgtacatccgaaatacaaaatgttaccggatttatggaagaagaaataaaggcaaaaatgcaattaaaaatcgataaacttacatttcaaatatatttatctgattctgataacataaaaatatcattgaatgagatactaacacatttcaacaataatgagaatgttacattattttattgtgatgaacgagacgcagaattcgttatgtgtctcgaggctaaaacacatttctctaccacaggagaatggccgttgataataagtaccgatcaggatactatgctatttgcatctactgataatcatcctaagatgataaaaaacttaactcaactgtttaaatttgttccctcggcagaggataactatttagcaaaattaacggcgttagtgaatggatgtgatttctttcctggactctatggggcatctataacacccaccaacttaaacaaaatacaattgtttagtgattttacaatcgataatatagtcactagtttggcaattaaaaattattatagaaagactaactctaccgtagacgtgcgtaatattgttacgtttataaacgattacgctaatttagacgatgtctactcgtatgttcctccttgtcaatgcactgttcaagaatttatattttccgcattagatgaaaaatggaatgaatttaaatcatcttatttagagaccgttccgttaccctgtcaattaatgtacgcgttagaaccacgtaaggagattgatgtttcagaagttaaaactttatcatcttatatagatttcgaaaatactaaatcagatatcgatgttataaaatctatatcctcgatttttggatattctaacgaaaactgtaacacgatagtattcggcatctataaggataatttactactgagtataaataattcattttactttaacgatagtctgttaataaccaatactaaaagtgataatataataaatataggttactagattaaaaatggtgttccaactcgtgtgctctacatgcggtaaagatatttctcacgaacgatataaattgattatacgaaaaaaatcattaaaggatgtactcgtcagtgtaaagaacgaatgttgtaggttaaaattatctacacaaatagaacctcaacgtaacttaacagtgcaacctctattggatataaactaatatggatccggttaattttatcaagacatatgcgcctagaggttctattatttttattaattataccatgtcattaacaagtcatttgaatccatcgatagaaaaacatgtgggtatttattatggtacgttattatcggaacacttggtagttgaatctacctatagaaaaggagttcgaatagtcccattggatagtttttttgaaggatatcttagtgcaaaagtatacatgttagagaatattcaagttatgaaaatagcagctgatacgtcattaactttattgggtattccgtatggatttggtcatgatagaatgtattgttttaaattggtagctgactgttataaaaatgccggtgttgaaacatcgtctaaacgaatattaggtaaagatatttttctgagccaaaacttcacagacgataatagatggataaagatatatgattctaataatttaacattttggcaaattgattaccttaaagggtgagttaatatgcataactactcctccgttgttttttccctcgttctttttcttaacgttgtttgccatcactctcataatgtaaagatattctaaaatggtaaacttttgcatatcggacgcagaaattggtataaatgttgtaattgtattatttcccgtcaatggactagtcacagctccatcagttttatatcctttagagtatttctcactcgtgtctaacattctagagcattccatgatctgtttatcgttgatattggccggaaagatagattttttattttttattatattactattggcaattgtagatataacttctggtaaatatttttctaccttttcaatctcttctattttcaagccggctatatattctgctatattgttgctagtatcaataccttttcttgctaagaagtcatatgtggtattcactatatcagttttaactggtagttccattagcctttccacttctgcagaataatcagaaattggttctttaccagaaaatccagctactataataggctcaccgatgatcattggcaaaatcctatattgtaccagattaatgagagcatatttcatttccaataattctgctagttcttgagacattgatttatttgatgaatctagttggttctctagatactctaccatttctgccgcatacaataacttgttagataaaatcagggttatcaaagtgtttagcgtggctagaatagtgggcttgcatgtattaaagaatgcggtagtatgagtaaaccgttttaacgaattatatagtctccagaaatctgtggcgttacatacatgagccgaatgacatcgaagattgtccaatatttttaatagctgctctttgtccattatttctatatttgactcgcaacaattgtagataccattaatcactgattcctttttcgatgccggacaatagcacaattgtttagctttggactctatgtattcagaattaatagatatatctcttaatacagattgcactatacattttgaaactatgtcaaaaattgtagaacgacgctgttctgcagccatttaactttaaataatttacaaaaatttaaaatgagcatccgtataaaaatcgataaactgcgccaaattgtggcatatttttcagagttcagtgaagaagtgtctataaatgtagactcgacggatgagttaatgtatatttttgccgccttgggcggatctgtaaacatttgggccattatacctctcagtgcatcagtgttctaccgcggagccgaaaatattgtgtttaatcttccggtgtccaaggtaaaatcgtgtttgtgtagttttcacaatgatgccatcatagatatagaacctgatctggaaaataatctagtaaaactttctagttatcatgtagtaagtgtcgattgtaacaaggaactgatgcctattaggacagatactactatttgtctaagtatagatcaaaagaaatcttacgtgtttaattttcacaagtatgaagaaaaatgttgtggtagaaccgtcattcatttagaatggttgttgggctttatcaagtgtattagtcagcatcagcatttggctattatgtttaaagatgacaatattattatgaagactcctggtaatactgatgcgttttccagggaatattctatgactgaatgttctcaagaactacaaaagttttctttcaaaatagctatctcgtctctcaacaaactacgaggattcaaaaagagagtcaatgtttttgaaactagaatcgtaatggataatgacgataacattctaggaatgttgttttcggatagagttcaatcctttaagatcaacatctttatggcgtttttagattaatactttcaatgagataaatatgggtggcggagtaagtgttgagctccctaaacgggatccgcctccgggagtacccactgatgagatgttattaaacgtggataaaatgcatgacgtgatagctcccgctaagcttttagaatatgtgcatataggaccactagcaaaagataaagaggataaagtaaagaaaagatatccagagtttagattagtcaacacaggacccggtggtctttcggcattgttaagacaatcgtataatggaaccgcacccaattgctgtcgcacttttaatcgtactcattattggaagaaggatggaaagatatcagataagtatgaagagggtgcagtattagaatcgtgttggccagacgttcacgacactggaaaatgcgatgttgatttattcgactggtgtcagggggatacgttcgatagaaacatatgccatcagtggatcggttcagcctttaataggagtgatagaactgtagagggtcaacaatcgttaataaatctgtataataagatgcaaacattatgtagtaaagatgctagtgtaccaatatgtgaatcatttttgcatcatttacgcgcacacaatacagaagatagcaaagagatgatcgattatattctaagacaacagtctgcggactttaaacagaaatatatgagatgtagttatcccactagagataagttagaagagtcattaaaatatgcggaacctcgagaatgttgggatccagagtgttcgaatgccaatgttaatttcttactaacacgtaattataataatttaggactttgcaatattgtacgatgtaatactagcgtgaacaacttacagatggataaaacttcctcattaagattgtcatgtggattaagcaatagtgatagattttctactgttcccgtcaatagagcaaaagtagttcaacataatattaaacattcgttcgacctaaaattgcatttgatcagtttattatctctcttggtaatatggatactaattgtagctatttaaatgggtgccgcggcaagcatacagacgacggtgaatacactcagcgaacgtatctcgtctaaattagaacaagaagcgaacgctagtgctcaaacaaaatgtgatatagaaatcggaaatttttatatccgacaaaaccatggatgtaacctcactgttaaaaatatgtgctctgcggacgcggatgctcagttggatgctgtgttatcagccgctacagaaacatatagtggattaacaccggaacaaaaagcatacgtgccagctatgtttactgctgcgttaaacattcagacaagtgtaaacactgttgttagagattttgaaaattatgtgaaacagacttgtaattctagcgcggtcgtcgataacaaattaaagatacaaaacgtaatcatagatgaatgttacggagccccaggatctccaacaaatttggaatttattaatacaggatctagcaaaggaaattgtgccattaaagcgttgatgcaattgacgactaaggccactactcaaatagcacctagacaagttgctggtacaggagttcagttttatatgattgttatcggtgttataatattggcagcgttgtttatgtactatgccaagcgtatgctgttcacatccaccaatgataaaatcaaacttattttagccaataaggaaaacgtccattggactacttacatggacacattctttagaacttctccgatggttattgctaccacggatatacaaaactgaaaatatattgataatattttaatagattaacatggaagttatcgctgatcgtctagacgatatagtgaaacaaaatatagcggatgaaaaatttgtagattttgttatacacggtctagagcatcaatgtcctgctatacttcgaccattaattaggttgtttattgatatactattatttgttatagtaatttatatttttacggtacgtctagtaagtagaaattatcaaatgttgttggtggcgctagtcatcacattaactattttttattactttatactataatagtactagactgacttctaacaaacatctcacctgccataaataaatgcttgatattaaagtcttctatttctaacactattccatctgtggaaaataatactctgacattatcgctaattgacacatcggtgagtgatatgcctataaagtaataatcttctttgggcacatataccagtgtaccaggttctaacaacctatttactggtgctcctgtagcatactttttctttaccttgagaatatccatcgtttgcttggtcaatagcgatatgtgattttttatcaaccactcgaaaaagtaattggagtgttcatatcctctacgggctattgtctcatggccgtgtatgaaatttaagtaacacgactgtggtagatttgttctatagagccggttgccgcaaatagatagaactaccaatatgtctgtacaaatgttaaacattaattgattaacagaaaaaacaatgttcgttctgggaatagaaaccagatcaaaacaaaattcgttagaatatatgccacgtttatacattgaatataaaataactacagtttgaaaaataacagtatcatttaaacatttaacttgcggggttaatctcacaactttactgtttttaaactgttcaaaatatagcatcgatccatgagaaatacgtttagccgcctttaatagaggaaatcccaccgcctttctggatctcaccaacgacgatagttctgaccagcaactcatttcttcatcatccacctgttttaacatataataggcaggagatagatatccgtcattgcaatattccttctcgtaggcacacaatctaatattgataaaatctccattctcttctctgcatttattatcttgtttcggtggctgattaggctgtagtcttggtttaggctttggtatatcgttgttgaatctattttggtcattaaatctttcatttcttcctggtatatttttatcacctcgtttggttggatttttgtctatattatcgtttgtaacatcggtacgggtattcatttatcacaaaaaaaacttctctaaatgagtctactgctagaaaacctcatcgaagaagataccatattttttgcaggaagtatatctgagtatgatgatttacaaatggttattgccggcgcaaaatccaaatttccaagatctatgctttctatttttaatatagtacctagaacgatgtcaaaatatgagttggagttgattcataacgaaaatatcacaggagcaatgtttaccacaatgtataatataagaaacaatttgggtctaggagatgataaactaactattgaagccattgaaaactatttcttggatcctaacaatgaagttatgcctcttattattaataatacggatatgactgccgtcattcctaaaaaaagtggtaggagaaagaataagaacatggttattttccgtcaaggatcatcacctatcttgtgtattttcgaaactcgtaaaaagattaatatttataaagaaaatatggaatccgcatcgactgagtatacacctatcggagacaacaaggctttgatatctaaatatgcgggaattaatatcctaaatgtgtattctccttccacatccataagattgaatgccatttacggattcaccaataaaaataaactagagaaacttagtactaataaggaactagaatcgtatagttctagccctcttcaagaacccattaggttaaatgattttctgggactattggaatgtgttaaaaagaatattcctctaacagatattccgacaaaggattgattactataaatggagaatgttcctaatgtatactttaatcctgtgtttatagagcccacgtttaaacattctttattaagtgtttataaacacagattaatagttttatttgaagtattcgttgtattcattctaatatatgtattttttagatctgaattaaatatgttcttcatgcctaaacgaaaaatacccgatcctattgatagattacgacgtgctaatctagcgtgtgaagacgataaattaatgatctatggattaccatggatgacaactcaaacatctgcgttatcaataaatagtaaaccgatagtgtataaagattgtgcaaagcttttgcgatcaataaatggatcacaaccagtatctcttaacgatgttcttcgcagatgatgattcattttttaagtatttggctagtcaagatgatgaatcttcattatctgatatattgcaaatcactcaatatctagactttctgttattattattgatccaatcaaaaaataaattagaagccgtgggtcattgttatgaatctctttcagaggaatacagacaattgacaaaattcacagactttcaagattttaaaaaactgtttaacaaggtccctattgttacagatggaagggtcaaacttaataaaggatatttgttcgactttgtgattagtttgatgcgattcaaaaaagaatcctctctagctaccaccgcaatagatcctattagatacatagatcctcgtcgcgatatcgcattttctaacgtgatggatatattaaagtcgaataaagtgaacaataattaattctttattgtcatcatgaacggcggacatattcagttgataatcggccccatgttttcaggtaaaagtacagaattaattagacgagttggtaccaaaaattgaaaaactagcgtctttttttgctcgactgcagaccatgggaactcctaaaccgcggattctgccatggctggtgagtcagttggacctcggtcaattggagggtgtcgcgtgggtaaacaagagcaggactcgattccgcataccatggaaacacggactcaggcaagacgcacaacaagaggattttgggatctttcaggcgtgggccgaagcaaccggcgcctacgtcccaggaagagacaaacccgatttgccgacttggaagaggaacttcaggagtgctttgaaccgcaaggaggggcttaggctcgcggaggatagatccaaggacccacacgatccacacaaaatatacgaattcgtcaattccggtgtgggcgacttttcccaaccagacacctcccctgacactaacggcggtggaagtacgagtgatacccaggaggatatcttggacgaacttctcggtaatatggttctggcaccccttccagatcctggtccacctagtcttgcggtagcaccggagccctgcccccagccgcttagatccccctccctcgacaaccctacaccctttcccaacctcggtcctagcgagaacccgcttaaaaggttgctcgtgcccggtgaagaatgggagttcgaagtgacggcattttatcgcgggcgacaggtattccaacagactattagttgcccggaaggtcttagacttgtcgggagcgaggtgggggatcgcacccttcctggctggccagttacactccctgacccaggaatgtcattgactgacagaggcgttatgtcttatgtgcgccacgtattgtcttgcctcggaggcggcctggcgctctggagagcgggacagtggctttgggcacaaagactcgggcattgtcatacctattgggcagtgtccgaagaattgctgccgaatagcggacacgggccagacggtgaagtccctaaggacaaagaaggcggcgttttcgatttgggtccatttattgttgacctgatcactttcactgaggggtccggaaggagtcctcgctacgcgttgtggttttgtgtcggggaaagctggccccaggaccagccgtggacaaaacgactcgtgatggtcaaggttgttcctacttgccttcgggccttggtcgaaatggccagagtgggaggtgcatccagccttgagaacacagtcgatcttcacatttccaactctcaccccctgagtcttacgtctgaccaatataaagcgtatcttcaggacctcgtcgaagggatggacttccaaggacccggagagagttgattaattaatttttatgagctcggaggtaatgatatgtatcaatcggtgtgtagaaagtgttacatcgactcataatattatattttttatctaaaaaactaaaaataaacattgattaaattttaatataatacttaaaaatggatgttgtgtcgttagataaaccgtttatgtattttgaggaaattgataatgagttagattacgaaccagaaagtgcaaatgaggtcgcaaaaaaactaccgtatcaaggacagttaaaactattactaggagaattattttttcttagtaagttacagcgacacggtatattagatggtgccaccgtagtgtatataggatcggctcctggtacacatatacgttatttgagagatcatttctataatttaggagtgatcatcaaatggatgctaattgacggccgccatcatgatcctattttaaatggattgcgtgatgtgactctagtgactcggttcgttgatgaggaatatctacgatccatcaaaaaacaactgcatccttctaagattattttaatttctgatgtaagatccaaacgaggaggaaatgaacctagtacggcggatttactaagtaattacgctctacaaaatgtcatgattagtattttaaaccccgtggcatctagtcttaaatggagatgcccgtttccagatcaatggatcaaggacttttatatcccacacggtaataaaatgttacaaccttttgctccttcatattcagctgaaatgagattattaagtatttataccggtgagaacatgagactgactcgagttaccaaattagacgctgtaaattatgaaaaaaagatgtactaccttaataagatcgtccgtaacaaagtagttgttaactttgattatcctaatcaggaatatgactattttcacatgtactttatgctgaggaccgtgtactgcaataaaacatttcctactactaaagcaaaggtactatttctacaacaatctatatttcgtttcttaaatattccaacaacatcaactgaaaaagttagtcatgaaccaatacaacgtaaaatatctagcaaaaattctatgtctaaaaacagaaatagcaagagatccgtacgcggtaataaatagaaacgtgctactgagatatactaccgatatagagtataatgatttagttactttaataaccgttagacataaaattgattctatgaaaactgtgtttcaggtatttaacgaatcatccataaattatactccggttgatgatgattatggagaaccaatcattataacatcgtatcttcaaaaaggtcataacaagtttcctgtaaattttctatacatagatgtggtaatatctgacttatttcctagctttgttagactagatactacagaaactaatatagttaatagtgtactacaaacaggcgatggtaaaaagactcttcgtcttcccaaaatgttagagacggaaatagttgtcaagattctctatcgccctaatataccattaaaaattgttagatttttccgcaataacatggtaactggagtagagatagccgatagatctgttatttcagtcgctgattaatcaattagtagagatgagataagaacattataataatcaataatattatcttatatctcgtttagaaaaatgctaatattaaaatagctaacgctagtaatccaatcggaagccatttgatatctataatagggtatctaatttcctgattcagatagcggacagctatattctcggtagctactcgtttggaatcacaaacattatttacatctaatttactatctgtaatggaaacgtttcccaatgaaatggtacaatccgatacattgcattttgttatatttttttttaaagaggctggtaacaacgcatcgcttcgtttacatggctcgtaccaacaataatagggtaatcttgtatctattcctatccgtactatgcttttatcaggataaatacatttacatcgtatatcgtctttgttagcatcacagaatgcataaatttgttcgtccgtcatgataaaaatttaaagtgtaaatataactattatttttatagttgtaataaaaagggaaatttgattgtatactttcggttctttaaaagaaactgacttgataaaaatggctgtaatctctaaggttacgtatagtctatatgatcaaaaagagattaatgctacagatattatcattagtcatgttaaaaatgacgacgatatcggtaccgttaaagatggtagactaggtgctatggatggggcattatgtaaaacttgtgggaaaacggaattggaatgtttcggtcactggggtaaagtaagtatttataaaactcatatagttaagcctgaatttatttcagaaattattcgtttactgaatcatatatgtattcactgcggattattgcgttcacgagaaccgtattccgacgatattaacctaaaagagttatcgggacacgctcttaggagattaaaggataaaatattatccaagaaaaagtcatgttggaacagcgaatgtatgcaaccgtatcaaaaaattactttttcaaagaaaaaggtttgtttcgtcaacaagttggatgatattaacgttcctaattctctcatctatcaaaagttaatttctattcatgaaaagttttggccattattagaaattcatcaatatccagctaacttattttatacagactactttcccatccctccgctgattattagaccggctattagtttttggatagatagtatacccaaagagaccaatgaattaacttacttattaggtatgatcgttaagaattgtaacttgaatgctgatgaacaggttatccagaaggcggtaatagaatacgatgatattaaaattatttctaataacactaccagtatcaatttatcatatattacatccggcaaaaataatatgattagaagttatatcgtcgcccgacgaaaagatcagaccgctagatctgtaattggtcccagtacatctatcaccgttaatgaggtaggaatgcccgcatatattagaaatacacttacagaaaagatatttgttaatgcctttacagtggataaagttaaacaactattagcgtcaaaccaagttaaattttactttaataaacgattaaaccaattaacaagaatacgccaaggaaagtttatcaaaaataaaatacatttattgcctggtgattgggtagaagtagctgttcaagaatatacaagtattatttttggaagacagccgtctctacatagatacaacgtcatcgcttcatctatcagagctaccgaaggagatactatcaaaatatctcccggaattgccaactctcaaaatgctgatttcgacggagatgaagaatggatgatattggagcaaaatcctaaagccgtaattgaacaaagtattcttatgtatccgacgacgttactcaaacacgatattcatggagcccccgtttatggatctattcaagatgaaatcgtagcagcgtattcattgtttaggatacaagatctttgtttagatgaagtattgaacatcttggggaaatatggaagagagttcgatcctaaaggtaaatgtaaattcagcggtaaagatatctatacttacttgataggtgaaaagattaattatccgggtctcttaaaggatggtgaaattattgcaaacgacgtagatagtaattttgttgtggctatgaggcatctgtcattggctggactcttatccgatcataagtcgaacgtggaaggtatcaactttattatcaagtcatcttatgtttttaagagatatctatctatttacggttttggggtgacattcaaagatctgagaccaaattcgacgttcactaataaattggaggccatcaacgtagaaaaaatagaacttatcaaagaagcatacgccaaatatctcaacgatgtaagagacgggaaaatagttccattatctaaagctttagaggcggactatgtggaatccatgttatccaacttgacaaatcttaatatccgagagatagaagaacatatgagacaaacgctgatagatgatccagataataacctcctgaaaatggccaaagcgggttataaagtaaatcctacagaactaatgtatattctaggtacgtatggacaacaaaggattgatggtgaaccagcagagactcgagtattgggtagagtcttaccttactatcttccagactctaaggatccagaaggaagaggttacattcttaattctttaacaaaaggattaacgggttctcaatattacttttcgatgctggttgccagatctcaatctactgatatcgtctgtgaaacatcacgtaccggaacactggctagaaaaatcattaaaaagatggaggatatggtggtcgacggatacggacaagtagttataggtaatacgctcatcaagtacgccgccaattataccaaaattctaggctcagtatgtaaacctgtagatcttatctatccagatgagtccatgacttggtatttggaaattagtgctctgtggaataaaataaaacagggattcgtttactctcagaaacagaaacttgcaaagaagacattggcgccgtttaatttcctagtattcgtcaaacccaccactgaggataatgctattaaggttaaggatctgtacgatatgattcataacgtcattgatgatgtgagagagaaatacttctttacggtatctaatatagattttatggagtatatattcttgacgcatcttaatccttctagaattagaattacaaaagaaacggctatcactatctttgaaaagttctatgaaaaactcaattatactctaggtggtggaactcctattggaattatttctgcacaggtattgtctgagaagtttacacaacaagccctgtccagttttcacactactgaaaaaagtggtgccgtcaaacaaaaacttggtttcaacgagtttaataacttgactaatttgagtaagaataagaccgaaattatcactctggtatccgatgatatctctaaacttcaatctgttaagattaatttcgaatttgtatgtttgggagaattaaatccagacatcactcttcgaaaagaaacagataaatatgtagtagatataatagttaatagattatacatcaagagagcagaaataaccgaattagttgtcgaatatatgattgaacgatttatctcctttagcgtcattgtaaaggaatggggtatggagacattcattgaggacgaggataatattagatttactgtctacctaaatttcgttgaaccggaagaattgaatcttagtaagtttatgatggttcttccgggtgccgccaacaagggcaagattagtaaattcaagattcctatctctgattatacgggttatgacgacttcaatcaaacaaaaaagctcaataagatgactgtagaactcatgaatctaaaagaattgggttctttcgatttggaaaacgtcaacgtgtatcctggagtatggaatacatacgatatcttcggtatcgaggccgctcgtgaatacttgtgcgaagccatgttaaacacctatggagaagggttcgattatctgtatcagccttgtgatcttctcgctagtttactatgtgctagttacgaaccagaatcagttaataaattcaagttcggtgcagctagtactcttaagagagctacgttcggagacaataaagcattgttaaacgcggctcttcataaaaagtcagaacctattaacgataatagtagctgccacttttttagcaaggtccctaatataggaactggatattacaaatactttatcgacttgggtcttctcatgagaatggaaaggaaactatctgataagatatcttctcaaaagatcaaggaaatggaagaaacagaagacttttaattcttatcaataacatatttttctatgatctgtcttttaaacgatggattttccacaaatgcgcctctcaagtccctcatagaatgatacacgtataaaaaatatagcataggcaatgactccttatttttagacattagatatgccaaaatcatagccccgcttctatttactcccgcagcacaatgaaccaacacgggctcgtttcgttgatcacatttagataaaaaggcggttacgtcgtcaaaatatttactaatatcggtagttgtatcatctaccaacggtatatgaataatattaatattagagttaggtaatgtatatttatccatcgtcaaatttaaaacatatttgaacttaacttcagatgatggtgcatccatagcatttttataatttcccaaatacacattattggttacccttgtcattatagtgggagatttggctttgtgcatatctccagttgaacgtagtagtaagtatttatacaaacttttcttatccatttataacgtacaaatggataaaactactttatcggtaaacgcgtgtaatttagaatacgttagagaaaaggctatagtaggcgtacaagcagccaaaacatcaacacttatattctttgttattatattggcaattagtgcgctattactctggtttcagacgtctgataatccagtctttaatgaattaacgagatatatgcgaattaaaaatacggttaacgattggaaatcattaacggatagcaaaacaaaattagaaagtgatagaggtagacttctagccgctggtaaggatgatatattcgacttcaaatgtgtggatttcggcgcctattttatagctatgcgattggataagaaaacatatctgccgcaagctattaggcgaggtactggagacgcgtggatggttaaaaaggcggcaaaggtcgatccatctgctcaacaattttgtcagtatttgataaaacacaagtctaataatgttattacttgtggtaatgagatgttaaatgaattaggttatagcggttattttatgtcaccgcattggtgttccgattttagtaatatggaatagtgttagataaatgcggtaacgaatgttcctgtaaggaaccataacagtttagatttaacgttaaagatgagcataaacataataaacaaaattacaatcaaacctataacattaatatcaaacaatccaaaaaatgaaatcagtggagtagtaaacgcgtacataactcctggataacgtttagcagctgccgttcctattctagaccaaaaattcggtttcatgttttcgaagcggtgttctgcaacaagtcggggatcgtgttctacatatttggcggcgttatccagtatctgcctattgatcttcatttcgttttcgattctggctatttcaaaataaaatcccgatgatagacctccagactttataatttcatctacgatgttcagcgccgtagtaactctaataatataggctgataagctaacatcataccctcctgtatatgtgaatatggcatgatttttgtccattacaagctcggttttaactttattgcctgtaataatttctctcatctgtaggatatctatttttttgtcatgcattgccttcaagacgggacgaagaaacgtaatatcctcaataacgttatcgttttctacaataactacatattctacctttttattttctaactcggtaaaaaaattagaatcccatagggctaaatgtctagcgatatttcttttcgtttcctctgtacacatagtgttacaaaaccctgaaaagaagtgagtatacttgtcatcatttctaatgtttcctccagtccactgtataaacgcataatccttgtaatgatctggatcatccttgactaccacaacatttcttttttctggcataacttcgttgtcctttacatcatcgaacttctgatcattaatatgctcatgaacattaggaaatgtttctgatggaggtctatcaataactggcacaacaataacaggagttttcaccgccgccatttagttattgaaattaatcatatacaactctttaatacgagttatattttcgtctatccattgtttcacatttacatatttcgacaaaaagatataaaatgcgtattccaatgcttctctgtttaatgaattactaaaatatacaaacacgtcactgtctggcaataaatgatatcttagaatattgtaacaatttattttgtattgcacatgttcgtgatctatgagttcttcttcgaatggcataggatctccgaatctgaaaacgtataaataggagttagaataataatatttgagagtattggtaatatataaactctttagcggtataattagtttttttctctcaatttctatttttagatgtgatggaaaaatgactaattttgtagcattagtatcatgaactctaatcaaaatcttaatatcttcgtcacacgttagctctttgaagtttttaagagatgcatcagttggttctacagatggagtaggtgcaacaattttttgttctacacatgtatgtactggagccattgttttaactataatggtgcttgtatcgaaaaactttaatgcagatagcggaagctcttcgccgcgactttctacatcgtaattgggttctaacgccgatctctgaatggatactagttttctaagttctaatgtgattctctgaaaatgtaaatccaattcctccggcattatagatgtgtatacatcggtaaataaaactatagtatccaacgatcccttctcgcaaattctagtcttaaccaaaaaatcgtatataaccacggagatggcgtatttaagagtggattcttctaccgttttgttcttggatgtcatataggaaactataaagtccgcactactgttaagaatgattactaacgcaactatatagttcaaattaagcattttggaaacataaaataactctgtagacgatacttgactttcgaataagtttgcagacaaacgaagaaagaacagacctctcttaatttcagaagaaaactttttttcgtattcctgacgtctagagtttatatcaataagaaagttaagaattagtcggttaatgttgtatttcattacccaagtttgagatttcataatattatcaaaagacatgataatattaaagataaagcgctgactatgaacgaaatagctatatggttcgctcaagaatatagtcttgttaaacgtggaaacgataactgtatttttaatcacgtcagcggcatctaaattaaatataggtatatttattccacacactctacaatatgccacaccatcttcataataaataaattcgttagcaaaattattaattttagtgaaatagttagcgtcaactttcatagcttccttcaatctaatttgatgctcacacggtgcgaattccactctaacatcccttttccatgcctcaggttcatcgatctctataatatctagtttcttgcgtttcacaaacacgggctcgtctctcgcgatgagatctgtatagtaactatgtaaatgataactagatagaaagatgtagctatatagatgacgatcctttaagagaggtataataactttaccccaatcagataaactattgttatggtcttcggaaaaagaatttttataaatttttccagtattttccaaatatacgtacttgacatctaaaaaatccttaatgataataggaatggataatccgtctattttataaagaaatacatatcgcacattatacttttttttggaaatgggaataccgatgtgtctacataaatatgcaaagtctaaatattttttagagaatcttagttggtccaaattcttttccaagtacggtaatagatttttcatattgaacggtatcttcttaatctctggttctagttccgcattaaatgatgaaactaagtcactatttttataactaacgattacatcacctctaacatcatcatttaccagaatactgatcttcttttgtcgtaaatacatgtctaatgtgttaaaaaaaagatcatacaagttatacgtcatttcatctgtggtattcttgtcattgaaggataaactcgtactaatctcttctttaacagcctgttcaaatttatatcctatatacgaaaaaatagcaaccagtgtttgatcatccgcgtcaatattctgttctatcgtagtgtataacaatcgtatatcttcttctgtgatagtcgatacgttataaaggttgataacgaaaatatttttatttcgtgaaataaagtcatcgtaggattttggacttatattcgcgtctagtagatatgcttttatttttggaatgatctcaattagaatagtctctttagagtccatttaaagttacaaacaactaggaaattggtttatgatgtataatttttttagtttttatagattctttattctatacttaaaaaatgaaaataaatacaaaggttcttgagggttgtgttaaattgaaagcgagaaataatcataaattatttcattatcgcgatatccgttaagtttgtatcgtaatggcgtggtcaattacaaataaagcggatactagtagcttcacaaagatggctgaaatcagagctcatctaaaaaatagcgctgaaaataaagataaaaacgaggatattttcccggaagatgtaataattccatctactaagcccaaaaccaaacgagccactactcctcgtaaaccagcggctactaaaagatcaaccaaaaaggaggaagtggaagaagaagtagttatagaggaatatcatcaaacaactgaaaaaaattctccatctcctggagtcagcgacattgtagaaagcgtggccgctgtagagctcgatgatagcgacggggatgatgaacctatggtacaagttgaagctggtaaagtaaatcatagtgctagaagcgatctttctgacctaaaggtggctaccgacaatatcgttaaagatcttaagaaaattattactagaatctctgcagtatcgacggttctagaggatgttcaagcagctggtatctctagacaatttacttctatgactaaagctattacaacactatctgatctagtcaccgagggaaaatctaaagttgttcgtaaaaaagttaaaacttgtaagaagtaaatgcgtgcacttttttataaagatggtaaactctttaccgataataattttttaaatcctgtatcagacgataatccagcgtatgaggttttgcaacatgttaaaattcctactcatttaacagatgtagtagtatatgaacaaacgtgggaggaggcgttaactagattaatttttgtgggaagcgattcaaaaggacgtagacaatacttttacggaaaaatgcatgtacagaatcgcaacgctaaaagagatcgtatttttgttagagtatataacgttatgaaacgaattaattgttttataaacaaaaatataaagaaatcgtccacagattccaattatcagttggcggtttttatgttaatggaaactatgttttttattagatttggtaaaatgaaatatcttaaggagaatgaaacagtagggttattaacactaaaaaataaacacatagaaataagtcccgatgaaatagttatcaagtttgtaggaaaggacaaagtttcacatgaatttgttgttcataagtctaatagactatataagccgctattgaaactgacggatgattctagtcccgaagaatttctgttcaacaaactaagtgaacgaaaggtatacgaatgtatcaaacagtttggtattagaatcaaggatctccgaacgtatggagtcaattatacgtttttatataatttttggacaaatgtaaagtccatatctcctcttccatcaccaaaaaagttaatagcgttaactatcaaacaaactgctgaagtggtaggtcatactccatcaatttcaaaaagagcttacatggcaacgactattttagaaatggtaaaggataaaaattttttagatgtagtatctaaaactacgttcgatgaattcctatctatagtcgtagatcacgttaaatcatctacggatggatgatatagatctttacacaaataattacaagaccgataaatggaaatggataagcgtatgaaatctctcgcaatgacagctttcttcggagagctaaacacattagatattatggcattgataatgtctatatttaaacgccatccaaacaataccattttttcagtggataaggatggtcagtttatgattgatttcgaatacgataattataaggcttctcaatatttggatctgaccctcactccgatatctggagatgaatgcaagactcacgcatcgagtatagccgaacaattggcgtgtgtggatattattaaagaggatattagcgaatatatcaaaactactccccgtcttaaacgatttataaaaaaataccgcaatagatcagatactcgtatcagtcgagatacagaaaagcttaaaatagctctagctaaaggcatagattacgaatatataaaagacgcttgttaataagtaaatgaaaaaaaactagtcgtttataataaaacacaatatggatgccaacatagtatcatcttctactattgcaacgtatatagacgctttagcaaagaatgcttcagaattagaacagaggtctaccgcatacgaaataaataatgaattggaactagtatttattaagccgccattaattactttgacaaatgtagtgaatatctctacgattcaggaatcgtttattcgatttaccgttactaataaggaaggtgtcaaaattagaactaagattccattatctaaggtacatggtctagatgtaaaaaatgtacagttagtagatgctatagataacatagtttgggaaaagaaatcattagtgacggaaaatcgtcttcacaaagaatgcttgttgagactatcgacagaggaacgtcatatatttttggattacaagaaatatggatcctctatccgactagaattagtcaatcttattcaagcaaaaacaaaaaactttacgatagactttaagctaaaatattttctaggatccggtgcccaatctaaaagttctttgttgcacgctattaatcatccaaagtcaaggcctaatacatctctggaaatagaattcacacctagagacaatgaaaaagttccatatgatgaactaataaaggaattgacgactctatcacgtcatatatttatggcttctccagagaatgtaattctttctccgcctattaacgcacctataaagacttttatgttgcctaaacaagatatagtaggtctggatctggaaaatctatatgccgtaactaagactgacggcattcctataactatcagagttacatcaaacgggttgtattgttattttacacatcttgggtatattattagatatccagttaagagaataatagattccgaagtagtagtctttggtgaggcagttaaggataagaactggaccgtatatctcattaagctaatagagcctgtgaatgcaatcaatgatagactagaagaaagtaagtatgttgaatctaaactagtggatatttgtgatcggatagtattcaagtcaaagaaatatgaaggtccgtttactacaactagtgaagtcgtcgatatgttatctacatatttaccaaagcaaccagaaggtgttattctgttctattcaaagggacctaaatctaacattgattttaaaattaaaaaggaaaatactatagaccaaactgcaaatgtagtatttaggtacatgtccagtgaaccaattatctttggagaatcgtctatctttgtagagtataagaaatttagcaacgataaaggctttcctaaagaatatggttctggtaagattgtgttatataacggcgttaattatctaaataatatctattgtttggaatatattaatacacataatgaagtgggtattaagtccgtggttgtacctattaagtttatagcagaattcttagttaatggagaaatacttaaacctagaatcgataaaaccatgaaatatattaactcagaagattattatggaaatcaacataatatcatagtcgaacatttaagagatcaaagcatcaaaataggagatatctttaacgaggataaactatcggatgtgggacatcaatacgccaataatgataaatttagattaaatccagaagttagttattttacgaataaacgaactagaggaccgttgggaattttatcaaactacgtcaagactcttcttatttctatgtattgttccaaaacatttttagacgattccaacaaacgaaaggtattggcgattgattttggaaacggtgctgacctggaaaaatacttttatggagagattgcgttattggtagcgacggatccggatgctgatgctatagctagaggaaatgaaagatacaacaaattaaactctggaattaaaaccaagtactacaaatttgactacattcaggaaactattcgatccgatacatttgtctctagtgtcagagaagtattctattttggaaagtttaatatcatcgactggcagtttgctatccattattcttttcatccgagacattatgctaccgtcatgaataacttatccgaactaactgcttctggaggcaaggtattaatcactaccatggacggagacaaattatcaaaattaacagataaaaagacttttataattcataagaatttacctagtagcgaaaactatatgtctgtagaaaaaatagctgatgatagaatagtggtatataatccatcaacaatgtctactccaatgactgaatacattatcaaaaagaacgatatagtcagagtgtttaacgaatacggatttgttcttgtagataacgttgatttcgctacaattatagaacgaagtaaaaagtttattaatggcgcatctacaatggaagatagaccgtctacaaaaaactttttcgaactaaatagaggagccattaaatgtgaaggtttagatgtcgaagacttacttagttactatgttgtttatgtcttttctaagcggtaaataataatatggtatgggttctgatatccccgttctaaatgcattaaataattccaatagagcgatttttgttcctataggaccttccaactgtggatactctgtattgttaatagatatattaatacttttgtcgggtaacagaggttctacgtcttctaaaaataaaagtttgataacatctggcctgttcataaataaaaacttggcgattctatatatactcttattatcaaatctagccattgtcttatagatgtgagctactgtaggtgtaccatttgattttctttctaatactatatatttctctcgaagaagttcttgcacatcatctgggaataaaatactactgttgagtaaatcagttattttttttatatcgatattgatggacatttttatagttaaggataataagtatcccaaagtcgataacgacgataacgaagtatttatacttttaggaaatcacaatgactttatcagatcaaaattaacaaaattaaaggagcatgtatttttttctgaatatattgtgactccagatacatatggatctttatgcgtcgaattaaatgggtctagttttcagcacggtggtagatatatagaggtggaggaatttatagatgctggaagacaagttagatggtgttctacatccaatcatatatctgaagatatacccgaagatatacacactgataaatttgtcatttatgatatatacacttttgacgctttcaagaataaacgattggtattcgtacaggtacctccgtcgttaggagatgatagctatttgactaatccgttattgtctccgtattatcgtaattcagtagccagacaaatggtcaatgatatgatttttaatcaagattcatttttaaaatatttattagaacatctgattagaagccactatagagtttctaaacatataacaatagttagatacaaggataccgaagaattaaatctaacgagaatatgttataatagagataagtttaaggcgtttgtattcgcttggtttaacggcgtttcggaaaatgaaaaggtactagatacgtataaaaaggtatctaatttgatataatgaattcagtgactgtatcacacgcgccatatactattacttatcacgatgattgggaaccagtaatgagtcaattggtagagttttataacgaagtagccagttggctgctacgagacgagacgtcgcctattcctgataagttctttatacagttgaaacaaccgcttagaaataaacgagtatgtgtgtgcggtatagatccgtatccgaaagatggaactggtgtaccgttcgaatcaccaaattttacaaaaaaatcaattaaggagatagcttcatctatatctagattaaccggagtaattgattataaaggttataaccttaatataatagacggggttataccctggaattattacttaagttgtaaattaggagaaacaaaaagtcacgcgatctactgggataagatttccaagttactgctgcagcatataactaaacacgttagtgttctttattgtttgggtaaaacagatttctcgaatatacgggcaaagttagaatccccggtaactaccatagtgggatatcatccagcggctagagaccgtcaattcgagaaagatcgatcatttgaaattatcaacgttttactggaattagacaacaaggtacctataaattgggctcaagggtttatttattaatgctttagtgaaattttaacttgtgttctaaatggatgcggctattagaggtaatgatgttatctttgttcttaagactataggtgtcccgtcagcgtgcagacaaaatgaagatccaagatttgtagaagcatttaaatgcgacgagttagaaagatatattgagaataatccagaatgtacactattcgaaagtcttagggatgaggaagcatactctatagtcagaattttcatggatgtagatttagacgcgtgtctagacgaaatagattatttaacggctattcaagattttattatcgaggtgtcaaactgtgtagctagattcgcgtttacagaatgcggcgccattcatgaaaatgtaataaaatccatgagatctaatttttcattgactaagtctacaaatagagataaaacaagttttcatattatctttttagacacgtataccactatggatacattgatagctatgaaacgaacactattagaattaagtagatcatctgaaaatccactaacaagatcgatagacactgccgtatataggagaaaaacaactcttcgggttgtaggtactaggaaaaatccaaattgcgacactattcatgtaatgcaaccacctcatgataatatagaagattacctattcacttacgtggatatgaacaacaatagttattacttttctctacaacgacgattggaggatttagttcctgataagttatgggaaccagggtttatttcattcgaagacgctataaaaagagtttcaaaaatattcattaattctataataaactttaatgatctcgatgaaaataattttacaacggtaccactggtcatagattacgtaacaccttgtgcattatgtaaaaaacgatcgcataaacatccgcatcaactatcgttggaaaatggtgctattagaatttacaaaactggtaatccacatagttgtaaagttaaaattgttccgttggatggtaataaactgtttaatattgcacaaagaattttagacactaactctgttttattaaccgaacgaggagaccatatagtttggattaataattcatggaaatttaacagcgaagaacccttgataacaaaactaattttgtcaataagacatcaactacctaaggaatattcaagcgaattactctgtccaagaaaacgaaagactgtagaagctaacatacgagacatgttagtagattcagtggagaccgatacctatccggataaacttccgtttaaaaatggtgtattggacctggtagacggaatgttttactctggagatgatgctaaaaaatatatgtgtactgtatcaaccggatttaaatttgacgatacaaagttcgtcgaagacagtccagaaatggaagagttaatgaatatcattaacgatatccaaccattaacggatgaaaataagaaaaatagagagctatatgaaaaaacattatctagttgtttatgcggtgctaccaaaggatgtttaacattcttttttggagaaactgcaactggaaagtcgacaaccaaacgtttgttaaagtctgctatcggtgacctgtttgttgagacgggtcaaacaattttaacagatgtattggataaaggacctaatccatttatcgctaacatgcatttgaaaagatctgtattctgtagcgaactacctgattttgcatgtagtgggtcaaagaaaatcagatctgataatattaaaaagttgacagaaccttgtgtcattggaagaccgtgtttctccaataaaattaataatagaaaccatgcgacaatcattatcgatactaattacaaacctgtttttgataggatagataacgcattaatgagaagaattgccgtcgtgcgattcagaacacacttttctcaaccttctggtagagaggctgctgaaaataatgacgcgtacgataaagtcaaactattagacgaggggttagatggtaaaatacaaaataatagatatagattcgcatttctatacttgttggtgaaatggtacagaaaatatcatgttcctattatgaaactatatcctacacccgaagagattcctgactttgcattctatctcaaaataggtactctgttggtatctagctctgtaaagcatattccattaatgacggacctctccaaaaagggatatatattgtacgataatgtggtcactcttccgttgactactttccaacagaaaatatccaagtattttaattctagactatttggacacgatatagagagcttcatcaatagacataagaaatttgccaatgttagtgatgaatatctgcaatatatattcatagaggatatttcatctccgtaaatatatgctcatatatttatagaagatatcacatatctaaatgaataccggaattatagatttatttgataatcatgttgatagtataccaactatattacctcatcagttagctactctagattatctagttagaactatcatagatgagaacagaagcgtgttattgttccatattatgggatcaggtaaaacaataatcgctttgttgttcgccttggtagcttccagatttaaaaaggtttacattctagtgccgaacatcaacatcttaaaaattttcaattataatatgggtgtagctatgaacttgtttaatgacgaattcatagctgagaatatctttattcattccacaacaagtttttattctcttaattataacgataacgtcattaattataacggattatctcgctacaataactctatttttatcgttgatgaggcacataatatctttgggaataatactggagaacttatgaccgtgataaaaaataaaaacaagattccttttctactattgtctggatctcccattactaacacacctaatactctgggtcatattatagatttaatgtccgaagagacgatagattttggtgaaattattagtcgtggtaagaaagtaattcagacacttcttaacgaacgcggtgtgaatgtacttaaggatttgcttaaaggaagaatatcatattacgaaatgcctgataaagatctaccaacgataagatatcacggacgtaagtttctagatactagagtagtatattgtcacatgtctaaacttcaagagagagattatatgattactagacgacagctatgttatcatgaaatgtttgataaaaatatgtataacgtgtcaatggcagtattgggacaacttaatctgatgaataatttagatactttatttcaggaacaggataaggaattgtacccaaatctgaaaataaataatggcgtgttatacggagaagaattggtaacgttaaacattagttccaaatttaaatactttattaatcggatacagacactcaacggaaaacattttatatacttttctaattctacatatggcggattggtaattaaatatatcatgctcagtaatggatattctgaatataatggttctcagggaactaatccacatatgataaacggcaaaccaaaaacatttgctatcgttactagtaaaatgaaatcgtctttagaggatctattagatgtgtataattctcctgaaaacgatgatggtagtcaattgatgtttttgttttcatcaaacattatgtccgaatcctatactctaaaagaggtaaggcatatttggtttatgactatcccagatactttttctcaatacaaccaaattcttggacgatctattagaaaattctcttacgccgatatttctgaaccagttaatgtatatcttttagccgccgtatattccgatttcaatgacgaagtgacgtcattaaacgattacacacaggatgaattaattaatgttttaccatttgacatcaaaaagctgttatatctaaaatttaagacgaaagaaacgaatagaatatactctattcttcaagagatgtctgaaacgtattctcttccaccacatccatcaattgtaaaagttttattgggagaattggtcagacaatttttttataataattctcgtattaagtataacgataccaagttacttaaaatggttacatcagttataaaaaataaagaagacgctaggaattacatagatgatattgtaaacggtcacttctttgtatcgaataaagtatttgataaatctcttttatacaaatacgaaaacgatattattacagtaccgtttagactttcctacgaaccatttgtttggggagttaactttcgtaaagaatataacgtggtatcttctccataaaactgatgagatatataaagaaataaatgtcgagctttgttaccaatggataccttccagttacattggagccacacgagctgacgttagacataaaaactaatattaggaatgccgtatataagacgtatctccatagagaaattagtggtaaaatggccaagaaaatagaaattcgtgaagacgtggaattacctctcggcgaaatagttaataattctgtagttataaacgttccgtgtgtaataacctacgcgtattatcacgttggggatatagttagaggaacattaaacatcgaagatgaatcaaatgtaactattcaatgtggagatttaatctgtaaactaagtagagattcgggtactgtatcatttagcgattcaaagtactgcttttttcgaaatggtaatgcgtatgacaatggcagcgaagtcactgccgttctaatggaggctcaacaaggtatcgaatctagttttgtttttctcgcgaatatcgtcgactcataagaaagagaatagcggtaagtataaacacgaatactatggcaataattgcgaatgttttattcccttcgatatatttttgataatatgaaaaacatgtctctctcaaatcggacaaccatctcataaaatagttatctcgcgctggcgaggtggttgccgctcgtataatctccccagaataatatacttgcgtgtcgtcgttcaatttatacggatttctatagttctctgttatataatgcggttttccatcatgattagacgacgacaatagtgttctaaatttagatagttgatcagaatgaatgtttattggcgttggaaaaattatccatgctgcgtctgcagagtggttgatagttgttcctagatatgtaaaataatccaacgtactaggtagcaaattgtctagataaaatactgaatcaaacggcgcagacgtattagcggatctaatggaatccaattgattgactatcttttgaaaatatacatttttatgatccgatacttgtaagaatatagaaataatgataagtccatcatcgtgtttttttgcctcttcataagaactatattttttcttattccaatgaacaagattaatctctccagagtatttgtacacatctatcaagtgattggatccataatcgtcttcctttccccaatatatatgtagtgatgataacacatattcattggggagaaaccctccacttatatatcctcctttaaaattaatccttactagttttccagtgttctggatagtggttggtttcgactcattataatgtatgtctaacggcttcaatcgcgcgttagaaattgcttttttagtttctatattaataggagatagttgttgcggcatagtaaaaatgaaatgataactgtttaaaaatagctcttagtatgggaattacaatggatgaggaagtgatatttgaaactcctagagaattaatatctattaaacgaataaaagatattccaagatcaaaagacacgcatgtgtttgctgcgtgtataacaagtgacggatatccgttaataggagctagaagaacttcattcgcgttccaggcgatattatctcaacaaaattcagattctatctttagagtatccactaaactattacggtttatgtactacaatgaactaagagaaatctttagacggttgagaaaaggttctatcaacaatatcgatcctcactttgaagagttaatattattgggtggtaaactagataaaaaggaatctattaaagattgtttaagaagagaattaaaagaggaaagtgatgaacgtataacagtaaaagaatttggaaatgtaattctaaaacttacaacacgggataaattatttaataaagtatatataggttattgcatggcgtgttttattaatcaatcgttggaggatttatcgcatactagtatttacaatgtagaaattagaaagattaaatcattaaatgattgtattaacgacgataaatacgaatatctgtcttatatttataatatgctagttaatagtaaatgaacttttacagatctagtataattagtcagattattaagtataatagacgactagctaagtctattatttgcaaggatgactctcaaattattacactcacggcattcgttaaccaatgcctatggtgtcataaacgagtatccgtgtccgctattttattaactactgataacaaaatattagtatgtaacagacgagatagttttctctattctgaaataattagaactagaaacatgtttagaaagaaacgattatttctgaattattccaattatttgtccaaacaggaaagaagtatactatcgtcatttttttctctatatccagctactgctgataatgatagaatagacgctatttatccgggtggcatacccaaaaggggtgagaatgttccagagtgtctatccagggaaatcaaagaagaagttaatatagacaattcttttgtattcatagacactcggttttttattcatggtatcatagaagataccattatcaacaaattttttgaggtaattttctttgtcggaagaatatctctaacgagtgatcaaattattgatacctttaaaagtaatcatgaaatcaaggatctaatatttttagatccgaattcaggtaatggactccaatacgaaattgcaaaatatgctctagatactgcaaaacttaaatgttacggccatagaggatgttattatgaatcattaaaaaaattaactgaggatgattgattagaaaatataaattaatttaccatcgtgtatttttataacgggattgtccggcatatcatgtagatagttaccgtctacatcgtatactcgaccatctacgcctttaaatcctctatttattgacattaatctattagaattggaataccaaatattagtaccctcaattagtttattggtaatattttttttagacgatagatcgatggctcttgaaaccaaggttttccaaccggactcattgtcgatcggtgagaagtctttttcattagcatgaatccattctaatgatgtatgtttaaacactctaaacaattggacaaattcttttgatttgctttgaatgatttcaaataggtcttcgtctacagtaggcataccattagataatctagccattataaagtgcacgtttacatatctacgttctggaggagtaagaacgtgactattgagacgaatggctcttcctactatctgacgaagagacgcctcgttccatgtcatatctaaaatgaagatatcattaattgagaaaaaactaataccctcgcctccactagaagagaatacgcatgttttaatgcattctccgttagtgtttgattcttggttaaactcagccaccgccttgattctagtatcttttgttctagatgagaactctatattagagataccaaagactttgaaatatagtaataagatttctattcctgactgattaacaaatggttcaaagactagacatttaccatgggatgctaatattcccaaacatacatctataaatttgacgcttttctcttttaattcagtaaatagagagatatcagccgcactagcatcccctttcaatagttctccctttttaaaggtatttaatgcggatttagaaaactctctatctcttaatgaatttttaaaatcattatatagtgttgctatctcttgcgcgtattcgccgggatcacgattttgtctttcaggaaagctatcgaacgtaaacgtagtagccatacgtctcagaattctaaatgatgatataccagtttttatttctgcgagtttagccttttgataaatctcttcttgcttttttgacatattaacgtatcgcattaatactgttttcttagcgaatgatgcagacccttctacgttatcaaaaatagaaaactcgttattaactatgtacgaacataggcctcctagtttggagactaattctttttcatcgactagacgtttattctcaaatagtgattggtgttgtaaggatcctggtcgtagtaagttaaccaacatggtgaattcttgcacactattgacgataggtgtagccgataaacaaatcatcttatggttttttaatgcgatggtcttggataaaaaattatatactgaacgagtaggacggatcttaccatcttctttgattaatgatttagaaatgaagttatgacattcatcaataatgacgcatattctactcttggaattaatagttttgatattagtaaaaaatttatttctaaaattttgatcatcgtaattaataaaaatacaatccttcgttatctctggagcgtatctgagtatagtgttcatccaaggatcttctatcaaagcctttttcaccaataagataatagcccaattcgtataaatatccttaagatgtttgagaatatatacagtagtcattgttttaccgacacccgtttcatggaacaataaaagagaatgcatactgtctaatcctaagaaaactcttgctacaaaatgttgataatccttgaggcgtactacgtccgaccccatcatttcaacgggcatattagtagttctgcgtaaggcataatcgatataggccgcgtgtgatttactcatttatgagtgataagtaataactatgttttaaaaatcacagcagtagtttaactagtcttctctgatgtttgttttcgatactttttgaatcagaagtcatactagaataaagcaacgagtgaacgtaatagagagcttcgtatactctattcgaaaactctaagaacttattaatgaattccgtatccactggattgtttaaaatactaaattgaacactgttcacatccttccaagaagaagacttagtgacggacttaacatgagacataaataaatccaaattttttttacaaacatcactagccaccataatggcgctatctttcaaccagctatcgcttacgcattttagcagtctaacatttttaaagagactacaatatattctcatagtatcgattacacctctaccgaataaagttggaagtttaataatacaatatttttcgtttacaaaatcaaataatggtcgaaacacgtcgaaggttaacatcttataatcgctaatgtatagattgttttcagtgagatgattattagatttaatagcatctcgttcacgtttgaacagtttattgcgtgcgctgaggtcggcaactacggcgtccgctttagtactcctcccataatactttacgctattaatctttaaaatttcatagactttatctagatcgctttctggtaacatgatatcatgtgtaaaaagttttaacatgtcggtcggcattctatttagatcattaactctagaaatctgaagaaagtaattagctccgtattccagactaggtaatgggcttttacctagagacagattaagttctggcaatgtttcataaaatggaagaaggacatgcgttccctcccggatattttttacaatttcatccatttacaactctatagtttgttttcattattattagttattatctcccataatcttggtaatacttaccccttgatcgtaagataccttatacaggtcattacatacaactaccaattgtttttgtacataatagattggatggttgacatccatggtggaataaactactcgaacagatagtttatctttccccctagatacattggccgtaatagttgtcggcctaaagaatatctttggtgtaaagttaaaagttagggttcttgttccattattgctttttgtcagtagttcattataaattctcgagatgggtccgttctctgaatatagaacatcatttccaaatctaacttctagtctagaaataatatcggtcttattcttaaaatctattcccttgatgaagggatcgttaatgaacaaatccttggcctttgattcggctgatctattatctccgttatagacgttacgttgactagtccaaagacttacaggaatagatgtatcgatgatgttgatactatgtgatatgtgagcaaagattgttctcttagtggcatcactatatgttccagtaatggcggaaaactttttagaaatgttatatataaaagaattttttcgtgttccaaacattagcagattagtatgaagataaacactcatattatcaggaacattatcaatttttacatacacatcagcatcttgaatagaaacgataccatcttctggaacctcaacaatctcggcagactccggataaccagtcggtggaccatcgctaacaataactagatcatccaacaatctactcacatatgcatctatataatctttttcatcttgtgagtaccctggatacgaaataaatttattatccgtatttccataataaggtttagtataaacagagagcgatgttgccgcatgaacttcagttacagtcgccgttggttggtttatttgacctattactctcctaggtttctctataaacgatggtttaatttgtacattcttaaccatatatccaataaagctcaattcaggaacataaacaaattctttgttgaacgtttcaaagtcgaacgaagagtcacgaataacgatatcggatactggattgaaggttaccgttacggtaatttttgaatcggatagtttaagactgctgaatgtatcttccacatcaaacggagttttaatataaacgtatactgtagatggttctttaatagtgtcattaggagttaggccaatagaaatatcattaagttcactagaatatccagagtgtttcaaagcaattgtattattgatacaattattatataattcttcgccctcaatttcccaaataacaccgttacacgaagagatagatacgtgattaatacatttatatccaacatatggtacgtaaccgaatcttcccatacctttaacttctggaagttccaaactcagaaccaaatgattaagcgcagtaatatactgatccctaatttcgaagctagcgatagcctgattgtctggaccatcgtttgtcataactccggatagagaaatatattgcggcatatataaagttggaatttgactatcgactgcgaagacattagaccgtttaatagagtcatccccaccgatcaaagaattaatgatagtattattcattttctatttaaaatggaaaaagcttacaataaactccgtagagaaatatctataatttgtgagttttccttaaagtaacagcttccgtaaacgccgtctttatctcttagtaagtttattgtatttataaccttttccttatcttcatagaatactaaaggcaacaaagaaatttttggttcttctctaagagctacgtgagacttaaccatagaagccaacgaatccctacatattttagaacagaaataccctacttcaccacccttgtatgtctcaatactaataggtctaaaaaccaaatcttgattacaaaaccaacacttatcaattacactatttgtcttaatagacacatctgccatagatttataatactttggtagtatacaagcgagtgcttcttctttagcgggcttaaagactgctttaggtgctgaaataaccacatctggaaggcttactcgcttagccatttaattacggaactatttttttatacttctaatgagcaagtagaaaacctctcatctacaaaaacatactcgtgtccataatcctctaccatagttacacgttttttagatctcatatgtgctaaaaagttttcccatactaattggttactattatttttcgtataatttttaacagtttgaggttttagatttttagttacagaagtgatatcgaatattttatccaaaaagaatgaataattaattgtcttagaaggagtgttttcttggcaaaagaataccaagtgcttaaatatttctactacttcattaatcttttctgtactcagattcagtttctcatcttttacttgattgattatttcaaagactaacttataatcctttttatttattctctcgttagccttaagaaaactagatacaaaatttgcatctacatcatccgtggatatttgatttttttccatgatatccaagagttccgagataatttctccagaacattgatgagacaataatctccgcaatacatttctcaaatgaataagtttattagacacgtggaagtttgactttttttgtacctttgtacatttttgaaataccgactcgcaaaaaatacaatattcatatccttgttcagatactataccgttgtgtctacaaccgctacataatcgtagattcatgttaacactctacgtatctcgtcgtccaatattttatataaaaacattttatttctagacgttgccagaaaatcctgtaatacttttagttttttgggctgtgaataaagtatcgccctaatatggttaccgtcctccgccaatatagtagttaaattatccgcacatgcaaaagaacaccgcttaggcggattcagtacaatgttatatttttcgtaccaactcatttaaatatcataatctaaaatagttctgtaatatgtctagcgctaatatattgatcataatcctgtgcataaattaagatacaacaatgtctcgaaatcatcgacatggcttcttccatagttagaagatcgtcgtcaaagttagcaacgtgattcatcaacatttgctgttttgaggcagcaaatactgaaccgtcgccattcaaccattcataaaaaccatcgtctgaatccattgataatttcttgtactggtttttgagagctcgcatcaatctagcatttctagctcccggattgaaaacagaaagaggatcgtacatccagggtccattttctgtaaatagaatcgtataatgtcccttcaagaagatatcagacgatccacaatcaaagaattggtctccgagtttgtaacaaactgcggactttaacctatacatgataccgtttagcataatttctggtgatacgtcaatcggagtatcatctattagagatctaaagccggtgtaacattctccaccaaacatattcttattctgacgtcgttctacataaaacatcattgctccattaacgataacaggggaatgaacagcactacccatcacattagttcccaatggatcaatgtgtgtaactccagaacatcttccatagcctatgttaggaggagcgaacaccactcttccactattgccatcgaatgccatagaataaatatccttggaattgatagaaatcggactgtcggatgttgtgatcatcttcataggattaacaacgatgtatggtgccgcctgaagtttcatatcgtaactgatgccgttcataggtctagccacagaaaccaacgtaggtctaaatccaactatagacaaaatagaagccaatatctgttcctcatctgtcataacttgagagcatccagtatgaataatcttcattagatggggatctaccgcatcatcatcgttacaataaaaaattcccattctaatgttcataattgcttttctaatcatggtatgcatgtttgctctctgaatctctgtggaaattagatctgatacacctgtaatcactatcggattatcctccgtaagacgattaaccaacaacatataattataagactttacttttctaaattcataaagttgctggattaggctataggtgtctccatgtacatacgcgttctcgagcgcaggaagtttaataccgaatagtgccatcagaataggatgaatatagtaattagtttctggttttctataaataaaagacaaatcttgtgaactagacatatcggtaaaatgcatggattggaatcgtgtagtcgacagaagaatatgatgattagatggagagtatattttatctaactctttgagttggtcaccgattctaggactagctcgagaatgaataagtactaaaggatgagtacatttcacagaaacactagcattgttcaatgtgctctttacatgggtaaggagttgaaatagctcgtttctatttgttctgacaatatttagtttattcataatgttaagcatatcctgaatagtaaagttagatgtgtcatacttgttagtagttagatatttagcaattgcattcccatcatttctcaatctcgtactccaatcatgcgtggatgctacttcgtcgatggaaaccatacaatcctttttgataggctgttgagattgattatttcctgcacgtttaggtttggtacgttgatttctagcccctgcggatataaagtcatcgtctacaatttgggacaatgaattgcatacactacaagacaaagatttatcagaagtgtgaatatgatcttcatctaccaaagaaagagtttgattagtataactagattttagtcctgcgttagatgttaaaaaaacatcgctattgaccacggcttccattatttatattcgtagtttttactcgaaagcgtgattttaatatccaatcttattacttttggaatcgttcaaaacctttgactagttgtagaatttgatctattgccctacgcgtatactcccttgcatcatatacgttcgtcaccagatcgtttgtttcggcctgaagttggtgcatatctttttcaacactcgacatgagatccttaagggccatatcgtctagattttgttgagatgctgctcctggatttggattttgttgtgctgttgtacatactgtaccaccagtaggtgtaggagtacatacagtggccacaataggaggttgaggaggtgtaaccgttggagtagtacaagaaatatttccatccgattgttgtgtacatgtagttgttggtaacgtctgagaaggttgggtagatggcggtgtcgtcgtcttttgatctttattaaatttagagataatatcctgaacagcattgctcggcgtcaacgctggaaggagtgaactcgccggcgcatcagtatctgcagacagccaatcaaaaagattagacatatcagatgatgtattagtttgttgtcgtggttttggtgtaggagcagtactactaggtagaagaataggagccgatgtaggtgtcggaaccggctgtggagttatatgaatagttggttgtagcggttggataggctgtctgctggcggccatcatattatctctagctagttgttctcgcaactgtctttgataatacgactcttgagactttagtcctatttcaatcgcttcatcctttttcgtatccggatccttttcttcagaataatagattgacgactttggtgtagaggattctgccagcccctgtgagaacttgttaaagaagtccatttaaggctttaaaattgaattgcgattataagattaaatggcagacacagacgatattatcgactatgaatccgatgatctcactgaatacgaggatgatgaagaagaggaagaagatggagagtcactagaaactagtgatatagatcccaaatcttcttataagattgtagaatcagcatccactcatatagaagatgcgcattccaatcttaaacatatagggaatcatatatctgctcttaaacgacgctatactagacgtataagtctatttgaaatagcgggtataatagcagaaagctataacttgcttcaacgaggaagattacctctagtttcagaattttctgacgaaacgatgaagcaaaatatgctacatgtaattatacaagagatagaggagggttcttgtcctatagtcatcgaaaagaacggagaattgttgtcggtaaacgattttgacaaagatggtctaaaattccatctagactatattatcaaaatttggaaacttcaaaaacgatattagaatttatacgaatatcgttctctaaatgtcacaatcaagtctcgcatgttcagcaatttattgtcgtactttatatcgtgttcattaacgatatcttgcaaaatagtaatgattctatcttccttcgatagatattcttcagagattattgtcttatattctttcttgttatcagatatgaatttgataagactttgaacattattgatacccgtctgtttaattttttctacagatattttagttttggcagattctatcgtatctgtcaatagacatccaacatcgacattcgacgtcaattgtctataaatcaacgtataaattttagaaataacattagcgaattgttgtgcattgatgtcgttattctgaaacagtatgattttaggtagcattttcttaacaaagagaacgtatttattgttactcagttgaacagatgatatatccagattactaacgcatctgattccgtataccaaactttcagaagaaatggtatacaattgtttgtattcattcaatgtctctttttcagaaattagtttagagtcgaatactgcaataattttcaagagatagttttcatcagataagattttatttagtgtagatatgataaaactattgttttgttggagaacttgatacgccgcgttctctgtagtcgacgctctcaaatgggaaacgatctccattatttttttggaatcggatactatatcttcggtatcttgacgcagtctagtatacatagagttaagagagattagagtttgtacattaagcaacatgtctctaaatgtggctacaaacttttccttttccacatcatctagtttattatataccgatttcacaacggcaccagatttaaggaaccagaatgaaaaactctgataactacaatatttcatcatagttacgattttatcatcttctatagttggtgtaatagcgcatacctttttctccaagactggaaccaacgtcataaaaatgtttaaatcaaaatccatatcaacatctgatgcgctaagaccagtctcgcgttcaagattatctttactaatggtgacgaactcatcgtatagaactctaagtttgtccattatttatttacagatttagttgtttaatttatttgtgctcttccagagttgggatagtatttttctaacgtcggtattatattattaggatctacgttcatatgtatcataatattaatcatccacgttttgataaatctatctttagcttctgaaataacgtatttaaacaaaggagaaaaatatttagctacggcatcagacgcaataacattttttgtaaatgtaacgtatttagacgacagatcttcgttaaaaagttttccatctatgtagaatccatcagttgttaacaccattcccgcgtcagattgaataggagtttgaatagtttgttttggaaatagatccttcaataacttatagttgggtgggaaaaaatcgattttatcactagactctttcttttttactatcattacctcatgaactatttcttgaatgagtatatgtattttctttcctatatcggacgcgttcattggaaaatataccatgtcgttaactataagaatatttttatcctcgtttacaaactgaataatatcagatgtagttcgtaaacgaactatatcatcaccagcacaacatctaactatatgatatccactagtttcctttagtcgtttattatcttgttccatattagcagtcattccatcatttaagaaggcgtcaaagataatagggagaaatgacattttggattctgttacaactttaccaaaattaaggatatacggacttactatctttttctcaacgtcaatttgatgaacacacgatgaaaatgtacttcgatgagattgatcatgtagaaaacaacaagggatacaatatttccgcatatcatgaaatatattaagaaatcccaccttattatatttccccaaaggatccatgcacgtaaacattatgccgttatcattaataaagacttctttctcatcggatctgtaaaagttgttactgatttttttcattccaggatctagataattaataatgatgggttttctattcttattctttgtattttggcatatcctagaccagtaaacagtttccactttggtaaaatcagcagacttttgaacgctattaaacatggcattaatggcaataactaaaaatgtaaaatatttttctatgttaggaatatggtttttcactttaatagatatatggtttttggccaaaatgatagatatttttttatccgaggatagtaaaatattattagtcgccgtctctataaaaatgaagctagtctcgatatccaattttattctagaattgataggagtcgccaaatgtaccttatacgttatatctcccttgatgcgttccatttgtgtatctatatcggacacaagatctgtaaatagttttacgttattaatcatcacggtatcgccgtcgctagataatgctaatgtaccatccaagtcccaaatggagagatttaactgttcatcgtttagaataaaatgattaccggtcatattaataaagtgttcatcgtatctagataacaacgacttataattaatgtccaagtcttgaactcgctgaatgatcttttttaacccagttagttttagattggtacgaaatatattgttaaactttgattctacagtaatgtccaaatctagttgtggaaatacttccatcaacattgtttcaaacttgataatattattatctacatcttcatacgatccaaattccggaatagatgtatcacatgctcttgccacccagataaccaaaaagtcacacgctccaggatatacattgtataaaaagctatcgtttttaagtagggtttttttctgcgtgtatacgaagggattaaaaatagtattatcaacgtaactatattccaaattattcttatgagaatagataataatatcgtccttaatatctaacaaatttcctaaatatccctttaattgagtcattcgaagcgtcaatagaatatgtctcttaactatttccggctgttgtatatttaaatgacttcgtaaaaaataatatatgggcgacttctcatctatgtaatcatatggagtgagatatagggctcgttctacctcctgccccttacccacctgtaataccaattgcggacttactatatatcgcatatttatatcgtggggtaaagtgaaaatctactaccgatgatgtaagtcttacaatgttcgaaccagtaccagatcttaatttggaggcctccgtagaactaggggaggtaaatatagatcaaacaacacctatgataaaggaaaatagcggttttatatcccgtagtagacgtctattcgcccatagatctaaggatgatgagagaaaactagcactacgattctttttacaaagactttattttttagatcatagagagattcattatttgttcagatgcgttgacgctgtaaaagacgtcactattaccaaaaaaaataacattatcgtggcgccttatatagcacttttaactatcgcatcaaaaggatgcaaacttacagaaacaatgattgaagcattctttccagaactatataatgaacatagtaagaaatttaaattcaactctcaagtatccatcatccaagaaaaactcggataccagtttggaaactatcacgtttatgattttgaaccgtattactctacagtagctctggctattcgagatgaacattcatctggcatttttaatatccgtcaagagagttatctggtaagttcattatctgaaataacatatagattttatctaattaatctaaaatctgatcttgttcaatggagtgctagtacgggcgctgtaattaatcaaatggtaaatactgtattgattacagtgtatgaaaagttacaactggtcatagaaaatgattcacaatttacatgttcattggctgtggaatcagaacttccaataaaattacttaaagatagaaatgaattatttacaaaattcatcaacgagttaaaaaagaccagttcattcaagataagcaaacgcgataaggatacgctactaaaatattttacttaggactggagttagaatttatagacgactcatttcgtttatcattattactaccatcattattagtattcttcttgttatcttgttcagaaatatacagcaatgctatgcctaatactaaatacattatcatgcttgcaatggctctaacaacgacgaaccaaaatgaatttggtcgtagcttttgttcacaaaaatacataaagaaatgtctacataaatctatggcgccattggctacttgaaatagcgccagtcctcctacagattttaatatagctgtataacatgacatttattcatcatcaaaagagacagagtcaccatctgtcatatttagattttttttcatgtgttcaaagtatcctctactcatttcattataatagtttatcatacttagaattttaggacggatcaatgagtaagacttgactagatcgtcagtagtaatttgtgcatcgtctattctgcatccgcttcgtcgaataatgtatagcatcgctttgagattctccatagctatcaagtctttatacaatgacatggaaatatctgtgaatactttatacttctccaacatcgatgccttaacatcatcgcctactttagcattgaaaatacgttctattgtgtagatggatgtagcaagatttttaaacaacaatgccatcttacacgatgattgcctcaagtctccaatcgtttgtttagaacgattagctacagagttcaacgcttggctgactagcatattattatctttagaaattgtattcttcaatgaagcgtttatcatatctgtgatttcgttagtcatattacagtctgactgggttgtaatgttatccaacatatcacctatggatacggtacacgtaccagcatttgtaataatcctatctaagatgttgtatggcattgcgcagaaaatatcttctcctgtaatatctccactctcgataaatctactcagattattcttaaatgccttattctctggagaaaagatatcagtgtccatcatttcattaatagtatacgcagaaaagataccacgagtatcaattctatccaagatacttatcggttccgagtcacagataatggtttcctctccttcgggagatcctgcatagaaatatctaggacaatagtttctatactgtctgtaactctgataatctctaaagtcactaactgataccatgaaattgagaagatcaaacgctgaagtaatcaatttttctgcctcgtttttactacaactagttttcatcaatgtagtgacgatgtattgtttagttactcttggtctaatactgatgatagagatattattacttcccataatggatcttctagtagtcaccttaaagcccattgatgcaaatagcagatagataaagtcttggtatgactcctttctaatatagtacggactacctttgtcacccaactttatacccacataagccataacaacctctttaatagccgtttcatgaggtttatcagccatgagcctgagtagttggaagaatctcatgaatcccgtctcagaaagtcctatatgcatgatagatttatctttcctgggaaactctcgtatagtcatagatgaaatactcttcaaagtttctgaaataagattagtaacagtcttacctccgactactctgggtaacaaacatactctaataggtgttttctctgcggagataatatcagaaaggatagagcaataagtagtattattgtgattataaagaccgaatacataacaggtagaatttataaacatcatgtcctgaaggtttttagacttgtattcctcgtaatccataccgtcccaaaacatggatttggtaactttgatagccgtagatctttgttccttcgccaacaggttaaagaaattaataaagaatttgttgtttctatttatgtccacaaattgcacgtttggaagcgtaactgttacgttcactgcagcattttgaggatcgcgagtatgaagtacgatgttattgtttactggtatatctggaaagaaatctaccagtctaggaataagagattgatatcgcatagaaatagtaaagtttataatctcatcatcgaagagcattttgttaccattgtaataaatatccactctgtcatatgtataaatgaagtactgttcaaacatgatgagatgtttatatgttggcatagtagtgagatcgacgtttggtaatggcaatgtattaagattaactccataatgtctagcagcatctgcgatgttataagtgtcgtcaaagcggggtcgatcttgtgctgttatatattgtctaacacctataagattatcaaaatcttgtctgcttaatacaccgttaacaatttttgccttgaattcttttattggtgcattaataacatccttatagaggatgttaaacaaataagtgttatcaaagttaagatctggatatttcttttctgctagaacatccattgagtcggagccatctggtttaatataaccaccgataaatctagctctgtattctgtatccgtcaatctaatattaagaaggtgttgagtgaaaggtggaagatcgtaaaagctgtgagtattaatgataggattagtttccgaactaatgttaattggggtattaataatatctatatttccagcgttaagtgtaacattaaacagttttaattcacgtgacgtggtatcaattaaataattaatgcccaatttggatatagcagcctgaagctcatcttgtttagttacggatcctaatgagttattaagcaatatatcgaacggatgaacgaaggttgttttaagttggtcacatactttgtaatctagacatagatgcggaagaacggtagaaactatacgaaataaatattcagagtcctctaattgatcaagagtaactattgacttaataggcatcatttatttagtattaaatgacgaccgtaccagtgacggatatacaaaacgatttaattacagagttttcagaagataattatccatctaacaaaaattatgaaataactcttcgtcaaatgtctattctaactcacgttaacaacgtggtagatagagaacataatgccgccgtagtgtcatctccagaggaaatatcctcacaacttaatgaagatctatttccagatgatgattcaccggccactattatcgaacgagtacaacctcatactactattattgacgatactccacctcctacttttcgtagagagttattaatatcggaacaacgtcaacaacgagaaaaaagatttaatattacagtatcgaaaaatgctgaagcaataatggaatctagatctatgataacttctatgccaacacaaacaccatccttgggagtagtttatgataaagataaaagaattcagatgttagaggatgaagtggttaatcttagaaatcaacgatctaatacaaaatcatctgataatttagataattttaccaaaatactatttggtaagactccgtataaatcaacagaagttaataagcgtatagccatcgttaattatgcaaatttgaacgggtcccccttatcagttgaggacttggatgtttgttcggaggatgaaatagatagaatctataaaacgattaaacaatatcacgaaagtagaaaacgaaaaattatcgtcactaacgtgattattattgtcataaacattatcgagcaggcattgctaaaactcggatttgaagaaatcaaaggactgagtaccgatatcacttcagaaattatcgatgtggagatcggagatgactgcgatgctgtagcatctaaactaggaatcggtaacagtccggttcttaatattgtattgtttatactcaagatattcgttaaacgaattaaaattatttaatttaatacattcccatatccagacaacaatcgtctggattaatctgttcctgtcgtctcataccggacgacatattaatctttttattagtaggcatctttttagatggtttctttttcccagcattaactgagtcgatacctagaagatcgtgattgatctctccgaccattccacgaacttctaattggccgtctctgacggtaccataaactattttaccagcattagtaacagcttggacaatctgaccatccattgcgttgaatgatgtagttgctgttgttctacgtttaggagcaccagaagtatttttggagcccttggaggctgatgtagaagaagacgaggattttgatttacatgtaatacattttgtactctttgattttgtatcacatgcgccggcagtcacatttgtttgagaattaagattattgttgcctcctttgacggctgcatctccaccgatttgcgctagtagatttttaagctgtggtgtaatcttattaactgtttcgatataatcatcgtaactgcttctaacggctaaattttttttatccgccatttagaagctaaaaatatttttatttatgcagaagatttaactagattatacaatgaactaatatgatccttttccagattatttacaaacttggtattttttggttctggaggaggcgaatttaaattcggacttggattcggattttgtgagttcttgatcttattatacatcgagtataggatggcgacggtaactgctacgcaaataccgatcaacaaaagaataccaatcatttattgacaataacttcactattgatcaagtatgcaatatatcatcttttcactaaataagtagtaataatgattcaacaatgtcgagatatatggacgataataatttagttcatggaaatatcgctatgattggtatgaatgactccgctaactctgtggggtgcgcagtgctttccccacatagaataaattagcattccgactgtgataataataccaagtataaacgccataatactcaatactttccatgtacgagtgggactggtagacttactaaagtcaataaaggcgaagatacacgaaagaatcaaaagaatgattccagcgattagcacgccggaaaaataatttccaatcataagcatcatgtccatttaactaataaaaattttaaatcgccgaatgaacaaagtggaatataaaccatataaaaacaatagtttgtactgcaaaaataatatctatttttgttttcgaagatatggtaaaattaaatagtagtacacagcatgttataactaacagcagcaacggctcgtaattacttatcatttactagacgaaaaggtggtgggatattttcttgctcaaataatacgaatatatcacccatccattttatgcgatgtttatatactctaatctttaatagatctatagacgacgggtttaccaacaatatagattttatcgattcatctaatttaaacccttccttaaacgtgaatgatctattatctggcataacgatgactctacctgatgaatcggacaatgtactgggccatgtagaataaattatcaacgaattatcgtctacgaacatttatatcatttgttttaattttaggacgcgaataaatggatataaaatagaaaataacagatattacaaccaatgttatggccgcgcccaaccaggtaggcagttttattttatcttttactacaggttctcctggatgtacgtcaccaacggcggacgtagttctagtacaattagacgtaagttctgcttgggaattttttaacgctaaagagttaacgttaatcgtgcacccaacgtatttacatctagttctttgaacatcttgattataatataaccattttctatctctagattcgtcggtgcactcatgtaaccaacataccctaggtcctaaatatttatctccggaattagattttggataattcgcgcaccaacaatttctatttcctttatgatcgttacaaaagacgtataatgccgtatccccaaaagtaaaataatcaggacgaataattctaataaactcagaacaatatctcgcatccatatgtttggagcaaatatcggaataagtagacatagccggtttccgttttgcacgtaaccattctaaacaattggggtttccaggatcgtttctacaaaatccagtcatgaaatcatcacaatgttctgtcttgtaattattattaaatatttttggacagtgtttggtatttgtcttagaacaacattttgccacgctatcactatcgcccaggagataatccttttttataaaatgacatcgttgcccggatgctatataatcagtggcgtgttttaaatccttaatatattcaggagttacctcgttctgataatagattaatgatccaggacgaaatttgaaagaactacatggttctccatgaattaatacatattgtttagcaaattcaggaactataaaactactacaatgatctatcgacataccatctatcaaacaaaacttgggtttaatttctcccggagatgtttcataatagtacgtataactttcttctgcaaacttaacagctctattatattcaggataattaaaacctaattccatatatttgtctcgtatatctgctattcctggtgctattttaattctattaagagtaacggctgcccccattcttaataatcgtcagtatttaaactgttaaatgttggtatatcaacatctaccttatttcccgcagtataaggtttgttgcaggtatactgttcaggaatggttacatttatacttcttctatagtcctgtctttcgatgttcatcacatatgcaaagaacagaataaacaaaataatgtaagaaataatattaaatatctgtgaattcgtaaatacattgattgccataataattacagcagctacaatacatacaatagacattcccacagtgttgccattacctccacgatacatttgagttactaagcaataggtaataactaagctagtaagaggcaatagaaaagatgagataaatatcatcaatatagagattagaggagggctatatagagccaagacgaacaaaatcaaaccgagtaacgttctaacatcattatttttgaagattcccaaataatcattcattcctccataatcgttttgcattatacctccatctttaggcataaacgattgctgctgttcctctgtaaataaatctttatcaagcactccagcacccgcagagaagtcgtcaagcatattgtaatatcttaaataactcatttatatattaaaaaatgtcactattaaagatggagtataatctttatgccgaactaaaaaaaatgacttgtggtcaacccctaagtctttttaacgaagacggggatttcgtagaagttgaaccgggatcatcctttaagtttctgatacctaagggattttacgcctctccttccgtaaagacgagtctagtattcgagacattaacaacgaccgataataaaatcactagtatcaatccaacaaatgcgccaaagttatatcctcttcaacgcaaagtcgtatctgaagtagtttctaatatgaggaaaatgatcgaatcaaaacgtcctctatacattactcttcacttggcgtgtggatttggtaagactattaccacgtgttatcttatggctacacacggtagaaaaaccgtcatttgcgtacccaataaaatgttaatacatcaatggaagacacaggtagaggcagtcggattggaacataagatatctatagatggagtaagtagtctattaaaggaactaaagactcaaagtccggatgtattaatagtagtcagtagacatctgacaaacgatgccttttgtaaatatatcaataagcattatgatttgttcatcttggatgaatcacatacgtataatctgatgaacaatacagcagttacaagatttttagcgtattatcctccgatgatgtgttattttttaactgctacacctagaccagctaaccgaatttattgtaacagtattattaatattgccaagttatccgatctaaaaaaaactatctatgcggtagatagtttttttgagccatattccacagacaatattagacatatggtaaaacgactagatggaccatctaataaatatcatatatatactgagaagttattatctgtagacgagcctagaaatcaacttattcttgataccctggtagaagaattcaagtcaggaactattaatcgaattttagttattactaaactacgtgaacatatggtattcttctacaaacgattattagattttttcggatcagaggttgtatttataggagacgcccaaaatagacgtactccagatatggtcaaatcaatcaaggaactaaatagatttatattcgtatccaccttattttattccggtactggtttagatattcctagtttggattcgttgttcatttgctcggcagtaatcaacaatatgcaaatagagcaattactagggagggtatgtcgagaaacagaactattagataggacggtatatgtatttcctaacacatccatcaaagaaataaagtacatgataggaaatttcatgcaacgaattattagtctgtctgtagataaactaggatttaaacaaaaaagttatcggaaacatcaagaatccgatcccacttctgtatgtacaacatcctccagagaagaacgtgtattaaatagaatatttaactcgcaaaatcgttaagaagtttaagcgacgatccgcatgctgcgcaggccagtgtattacccctcatagtattaatataatccaatgatacttttgtgatgtcggaaatcttaaccaatttagactgacaggcagaacacgtcatgcaatcatcatcgtcatcgataactgtagtcttgggcttctttttgcggctcttcattccggaacgcacattggtgctatccatttaggtagtaaaaaataagtcagaatatgccctatagcacgatcgtgcaaaacctggtatatcgtctctatctttatcacaatatagtgtatcgacatttttattattattgacctcgtttatcttggaacatggaatgggaacatttttgttatcaacggccatctttgccttaattccagatgttgtaaaattataactaaacagtctatcatcgacacaaatgaaattcttgtttagacgtttgtagtttacgtatgcggctcgttcgcgtctcattttttcagatattgcaggtactataatattaaaaataagaatgaaataacataggattaaaaataaagttatcatgacttctagcgctgatttaactaacttaaaagaattacttagtctgtacaaaagtttgaaattttcagattctgcggctatagaaaagtataattctttggtagaatggggaacatctacttactggaaaataggcgtgcaaaaggtagctaatgtcgagacgtcaatatctgattattatgatgaggtaaaaaataaaccgtttaatattgatccgggatattacattttcttaccggtatattttggaagcgtctttatttattcgaagggtaaaaatatggtagaacttggatctggaaactcttttcaaataccagatgatatgcgaagtgcgtgtaacaaagtattagacagcgataacggaatagactttctgagatttgttttgttaaacaatagatggataatggaagatgctatatcaaaatatcagtctccagttaatatatttaaactagctagtgagtacggattaaacatacccaaatatttagaaattgaaatagaggaagacacattatttgacgacgagttatactctattatagaacgctctttcgatgataaatttccaaaaatatccatatcgtatattaagttgggagaacttagacggcaagttgtagactttttcaaattctcgttcatgtatattgagtccatcaaggtagatcgtataggagataatatttttattcctagcgttataacaaaatcaggaaaaaagatattagtaaaagatgtagaccatttaatacgatccaaggttagagaacatacatttgtaaaagtaaaaaagaaaaacacattttccattttatacgactatgatggaaacggaacagaaactagaggagaagtaataaaacgaattatagacactataggacgagactattatgttaacggaaagtatttctctaaggttggtagtgcaggcttaaagcaattgactaataaattagatattaatgagtgcgcaactgtcgatgagttagttgatgagattaataaatccggaactgtaaaacgaaaaataaaaaaccaatcagcatttgatttaagcagagaatgtttgggatatccagaagcggattttataacgttagttaataacatgcggttcaaaatagaaaattgtaaggttgtaaatttcaatattgaaaatactaattgtttaaataacccgagtattgaaactatatatggaaactttaaccagttcgtctcaatctttaatatcgtcaccgatgtcaaaaaaagattattcgagtgaaataatatgcgcctttgatataggtgcaaaaaatcctgccagaactgttttagaagtcaaggataactccgttagggtattggatatatcaaaattagactggagttctgattgggaaaggcgcatagctaaagatttgtcacaatatgaatacactacagttcttctagaacgtcagcctagaaggtcgccgtacgtcaaatttatctattttattaaaggctttttatatcatacatcggctgccaaagttatttgcgtctcgcctgtcatgtctggtaattcatatagagatcgaaaaaagagatcggtcgaagcatttcttgattggatggacacattcggattgcgagactccgttccggatagacgcaaattagacgatgtagcggatagtttcaatttggctatgagatacgtattagataaatggaatactaattatacaccttataataggtgtaaatctagaaattacataaaaaaaatgtaataacgttagtaacgccattatggataatctatttacctttctacatgaaatagaagatagatatgccagaactatttttaactttcatctaataagttgcgatgaaataggagatatatatggtcttatgaaagaacgcatttcctcagaggatatgtttgataatatagtgtataataaagatatacatcatgccattaagaaactagtgtattgcgacatccaacttactaaacacattattaatcagaatacgtatccggtatttaacgattcttcacaagtgaaatgttgtcattatttcgacataaactcagataatagcaatattagctctcgtacagtagagatatttgagagggaaaagtcatctcttgtatcatatattaaaactaccaataagaagagaaaggtcaattacggcgaaataaagaaaactgttcatggaggcactaatgcaaattacttttccggtaaaaagtctgacgagtatctgagtactacagttagatccaacattaatcaaccttggatcaaaaccatctctaagaggatgagagttgatatcattaatcactctatagtaacgcgtggaaaaagctctatattacaaactatagaaattatttttactaatagaacatgtgtgaaaatattcaaggattctactatgcacattattctatccaaggacaaggatgaaaaggggtgtatacacatgattgacaaattattctatgtctattataatttatttctgttgttcgaggatatcatccaaaacgagtactttaaagaagtagctaatgttgtaaaccacgtacttacggctacggcattagatgagaaattattcctaattaagaaaatggctgaacacgatgtttatggagttagcaatttcaaaatagggatgtttaacctgacatttattaagtcgttggatcataccgttttcccctctctgttagatgaggatagcaaaataaagttttttaaggggaaaaagctcaatattgtagcattacgatctctggaggattgtataaattacgtgactaaatccgagaatatgatagaaatgatgaaggaaagatcgactattttaaatagcatagatatagaaacggaatcggtagatcgtctaaaagaattgcttctaaaatgaaaaaaaacactgattcagaaatggatcaacgactcggatataagtttttggtgcctgatcctaaagccggagttttttatagaccgttacatttccaatatgtatcgtattctaattttatattgcatcgattgcatgaaatcttgaccgtcaagcggccactcttatcgtttaagaataatacagaacgaattatgatagaaattagcaatgttaaagtgactcctccagattactcacctataatcgcgagtattaaaggtaagagttatgacgcattagccacgttcactgtaaatatctttaaagaggtaatgaccaaagagggtatatccatcactaaaataagtagttatgagggaaaagattctcatttgataaaaattccgctactaataggatacgggaataaaaatccacttgatacagccaagtatcttgttcctaatgtcataggtggagtctttatcaataaacaatctgtcgaaaaagtaggaattaatctagtagaaaagattacaacatggccaaaatttagggttgttaagccaaactcattcactttctcgttttcctccgtatcccctcctaatgtattaccgacaagatatcgccattacaagatatctctggatatatcacaattggaagcgtcgaatatatcatcgacaaagacatttataacggtcaatattgttttgctgtctcaatatttatctagagtgagtctagaattcattagacgtagcttatcatacgatatgcctccagaagttgtctatctagtaaacgcgataatagatagtgctaaacgaattactgaatctattactgactttaatattgatacatacattaatgacctggtggaagctgaacacattaaacaaaaatctcagttaacgatcaacgagttcaaatatgaaatgctgcataactttttacctcatatgaactatacacccgatcaactaaagggattttatatgatatctttactaagaaagtttctctactgtatctaccacacttctagatatccagatagagattcgatggtttgtcatcgtatactaacatacggcaaatattttgagacgttggcacatgatgaattagagaattacataggcaacatccgaaacgatatcatgaacaatcacaagaacagaggcacttacgcggtaaacattcatgtactaacaactcctggacttaatcatgcattttctagtctattgagtggaaagttcaaaaagtcagacggtagttatcgaacacatcctcactattcatggatgcagaatatttctattcctaggagtgttggattttatccggatcaagtaaagatttcaaagatgttttctgtcagaaaataccatccaagtcaatatctttacttttgttcatcagacgttccggaaagaggtcctcaggtaggtttagtatctcaattgtctgtcttgagttccattacaaatatactaacgtctgagtatttggatttggaaaagaaaatttgtgagtatatcagatcatattataaagatgatataagttactttgaaacaggatttccaatcactatagaaaatgctctagtcgcatctcttaatccaaatatgatatgtgattttgtaactgactttagacgtagaaaacggatgggattcttcggtaacttggaggtaggtattactttagttagggatcacatgaatgaaattcgcattaatattggagcgggaagattagtcagaccattcttggttgtggataacggagagctcatgatggatgtgtgtccggagttagaaagcagattagacgacatgacattctctgacattcagaaagagtttccgcatgtcatcgaaatggtagatatagaacaatttacttttagtaacgtatgtgaatcggttcaaaaatttagaatgatgtcaaaggatgaaagaaagcaatacgatttatgtgactttcctgccgaatttagagatggatatgtggcatcttcattagtgggaatcaatcacaattctggacccagagctattcttggatgtgctcaagctaaacaagctatctcttgtctgagctcggatatacgaaataaaatagacaatggaattcatttgatgtatccagagaggccaatcgtgattagtaaggctttagaaacttcaaagattgcggctaattgcttcggccaacatgttactatagcattaatgtcgtacaaaggtatcaatcaagaggatggaattatcatcaaaaaacaatttattcagagaggcggtctcgatattgttacagccaagaaacatcaagtagaaattccattggaaaactttaataacaaagaaagagataggtctaacgcctattcaaaattagaaagtaatggattagttagactgaatgctttcttggaatccggagacgctatggcacgaaatatctcatcaagaactcttgaagatgattttgctagagataatcagattagcttcgatgtttccgagaaatataccgatatgtacaaatctcgcgttgaacgagtacaagtagaacttactgacaaagttaaggtacgagtattaaccatgaaagaaagaagacccattctaggagacaaatttaccactagaacgagtcaaaagggaacagtcgcgtatgtcgcggatgaaacggaacttccatacgacgaaaatggtatcacaccagatgtcattattaattctacatccatcttctctagaaaaactatatctatgttgatagaggttattttaacagccgcatattctgctaagccgtacaacaataagggagaaaaccgacctgtctgttttcctagtagtaacgaaacatccatcgatacatatatgcaattcgctaaacaatgttatgagcattcaaatccgaaattgtctgatgaagaattatcggataaaatcttttgtgaaaagattctctatgatcctgaaacggataagccttatgcatccaaagtattttttggaccaatttattacttgcgtctgagacatttaactcaggacaaggcaaccgttagatgtagaggtaaaaagacgaagctcattagacaggcgaatgagggacgaaaacgtggaggaggtatcaagttcggagaaatggagagagactgtttaatagcgcatggtgcagccaatactattacagaagttttgaaagattcggaagaagattatcaagatgtgtatgtttgtgaaaattgtggagacatagcagcacaaatcaagggtattaatacatgtcttagatgttcaaaacttaatctctctcctctcttaacaaaaattgataccacacacgtatctaaagtatttcttactcaaatgaacgccagaggcgtaaaagtcaaattagatttcgaacgaagacctccttcgttttataaaccattagataaagttgatctcaaaccgtcttttctggtctaatattgtttagtagatacttatcaacatcatcaagattatcaagattatcaagattatcaagataagctaattcactaaacacattatcgatttcggtatcgttactcgcagaataaagttcgttatgatcctgatattcggaaatctgtggagtttcaggttttggtggatgtgtaacagctacttgagataccgaagtctgatattcagaaagctgtggatgttctggttcggcatccaccgatggtgttacaccactactaattggttcagtaacgtctgtggacgatggaggcaccacttctacaggttctggttctttatcctcagtcatcaacggagctacttcaatgcgaggaaatgtataatttggtaatggtttctcatgtggatctgaagaagaggtaagatatctactagaaagataccgatcacgttctagttctcttttgtagaacttaactttttctttctcagcatctagttgatattccaacctcttcacgttactacgttcagatttcaattcacgttcgcatgggttacctccgcagtttttacgagcgatttcacgttcagccttcatgcgtctctccctctctctatcgagtttatcagagcagtctttctgaaggcgatcgaactccataaatttctccaacgctttgattgtttccatagatttccgaagttcagcttttaggactgtgattctttttctttcgaattcacagctggatgtacaaccgtttccattaccgccatctctaagtttcttttctagatcggcaacatttcatccccatgccttttacattcctcgagtctactgtcgtcgaaatatcgttccagctccttttcgacatcaataactttagcacgttgtctctcaagctctcttttgtagttatctgattccctggcacgtttaagatcttcatgcaattgagtcagctcttaacacaatctcttgcttcttcgtcatagtacgcgcaatcactgtgagatccattgttaccacgtctacactcggcgagctcgcgtttaagagattcaatttcccgtttgtattggtccatgtttccattgctaccaccattagatttacaggctgctagttgtcgttcgagatcagaaatacgggttttcttggaattgatttcgtcgatgtacttggcatcgaaacacttattaagttctttttccaattctacgattttatttctttcgcgagtcaattccctcctgtagtaactatctgttttgtcagattcacgctctctacgtagactttcttgcaagttactaatttgttccctagcacgtccgagtttagttttatatgctgaatagagttctgattcatcctttgagcagatctctagcgatcgtttaagattcctgattctagtctttagcctatttacctcctcagaagatgttccgttaccgttgcgtttacactcgttaagctgtctatcaagatccatgattctatctctaagacgttgcatctctctttccatatcagcattgctttcattattacgtctgcagtcactcaactgtctttcaatatctgagattctatctctaagacgtcgcatctctctctgtttcggcattggtttcattattacgtctacagtcgttcaactgtctttcaagatctgatattctagattggagtctgctaatctctgtagcattttcacggcattcactcagttgtctttcaagatctgaaattttagattggagtctgctaatctctgtaagatttcctcctccgctctcgatgcagtcggtcaacttattctctagttctctaatacgcgaacgcagtgcatcaacttcttgcgtgtcttcctggttgcgtgtacattcatcgagtctagattcgagatctctaacgcgtcgtcgttcttcctcaagttctctgcgtactacagaaagcgtgtccctatcttgttgatatttagcaatttctgattctagagtactgattttgcttacgtagttactaatatttgtcttggccttatcaagatcctccttgtatttgtcgcattccttgatatccctacgaagtctggacagttcccattcgacattacgacgtttatcgatttcagctcggagatcgtcatcgcgttgttttagccacatacgactgagttcaagttctcgttgacaagatccatctacttttccattcctaatagtatccagttccttttctagttctgaacgcatttctcgttccctatcaagcgattctctcaattctcggatagtcttcttatcaatttctaataaatctgaaccatcatctgtcccattttgaatatccctgtgttctttgatctcttttgtaagtcggtcgattctttcggttttataaacagaatccctttccaaagtcctaatcttactgagtttatcactaagttctgcattcaattcggtgagttttctcttggcttcttccaactctgttttaaactctccactatttccgcattcttcctcgcatttatctaaccattcaattagtttattaataactagttggtaatcagcgattcctatagccgttcttgtaattgtgggaacataattaggatcttctaatggattgtatggcttgatagcatcatctttatcattattagggggatggacaaccttaattggttggtcctcatctcctccagtagcgtgtggttcttcaatagccgtgttagtaataggcttaggcaaatgcttgtcgtacgcgggcacttcctcatccatcaagtatttataatcgggttctacgtctgaatattcttttctaagagacgcaacttctggagttagtagaagaactctgtttctatatctatcaacgctggaatcaatactcaagttaaggatagcgaatacctcatcgtcatcatccgtatcctctgaaacgccatcatatgacatttcatgaagtctaacgtattgataaacagaatcagatttagtattaaacagatccttaacctttttagtaaatgcatatgtatattttagatctccagatttcataatatggtcgcatgccttaaatgtcagtgcttccataatatagtctggaacactaattggtgatgaaaaagataccggaccatatgctacgttgataaataactctgagccactaactagataatgattaatgttaaggaagaggaaatattcagtgtataggtatgtcttggcgtcatatcttgtactaaacacgctaaacagtttgttaatgtgatcaatttccaatagattaattagagcagcaggaataccaacaaacatattaccacatccgtattttctatgaatatcacatatcatgttaaaaaatcttgatagaagagcgaatatctcgtctgacttaatgagtcgtagttcagcagcaacataagtcataactgtaaatagaacatactttcctgtagtgttgattctagactccacatcaacaccattattaaaaatagttttatatacatctttaatctgctctccgttaatcgtcgaacgttctagtatacggaaacactttgatttcttatctgtagttaatgacttagtgatatcacgaagaatattacgaattacatttcttgtttttcttgagagacctgattcagaactcaactcatcgttccatagtttttttacctcagtggcgaaatctttggagtgcttggtacatttttcaataaggttcgtgacctccatttattataaaaaaattttattcaaaacttaactacaatcgggtaattataaaatcgtagatctcccatgtggtggaatactaccatctatcgcatgtggatggacagtaggtaatggccatgggaacagtaatgtttgcatatttatctttcttgccagtattactgcatattgtcccaatgtttcgatgtgatgttctaacctatcaactgccgctgtatcacaacaatagtgtccgatgaaattaagattatgatccaatgtgtttaatatatgattatcaagtcttatacgatccgcgtcttttttgacaggatcaggttcttctacaggaagaagtttcggcctcttatgatattcatgtctgggaaacggtggtctagggtgaggctccggtatcggagtgggttttggattataatcatcatcgtctatgacatcatcttcgacttcgatatttattttgctatcttgatgatgtcctgtatcagttgcattttcagcactcgactgaatattagcgcattcattgtttattattaccatatttctaaacccaaaatgtatatgttgaacatcagtactatcgttgatgagtcttatagcatgaattcgcttatcgttatcgggtttagcttctgtcaccttagcaattccttttttattaaactctacataatcatatccatttctattgtttgttctaatataaacgagtatagcatcattgctaaatttttcaatagtatcgaaaacagaatatcctaaaccatataatatatattcaggaacactcaaactaaatgtccaggattctcctaaatacgtaaactttaatagtgcgaaatcattcaaaaatctaccacttatagatagatagtacataaatgcgtatagtagtctacctatctctttattatgaaaaccggcattacgatcatatatgtcgtgatatacctgtgatccgtttacgttaaaccataaatacatgggtgatcctataaacatgaatttatttctaattctcagagctatagttaattgaccgtgtaatatttgcttacatgcatacttgatacgctcattaataagatttttatcattgctcgttatctcagaatcgtatatataaggagtaccatcgtgattcttaccagatattatacaaaatactatatataaaatatattgaccaacgttagtaatcatataaatgtttaacgttttaaattttgtattcaatgatccattatcatacgctagcatggtcttatgatattcattctttaaaatataatattgtgttagccattgcattggggctcctaatggagattttttattctcatccattttaggataggctttcataaagtccctaataacttcgtgaataatgtttctatgttttctactgatgcatgtatttgcttcgatttttttatcccatgtttcatctatcatagatttaaacgcagtaatgctcgcaacattaacatcttgaaccgttggtacaattccgttccataaatttataatgttcgccatttatataactcattttttgaatatacttttaattaacaaaagagttaagttactcatatggacgccgtccagtctgaacatcaatctttttagccagagatatcatagccgctcttagagtttcagcgtgattttccaacctaaatagaacttcatcgttgcgtttacaacacttttctatttgttcaaactttgttgttacattagtaatctttttttccaaattagttagccgttgtttgagagtttcctcattgtcgtcttcatcggctttaacaattgcttcgcgtttagcctctggctttttagcagcctttgtagaaaaaaattcagttgctggaattgcaagatcgtcatctccggggaaaagagttccgtccatttaaagtacagattttagaaactgacactctgcgttatttatatttggtacaacacatggattataaatattgatgttaataacatcagaaaatgtaaagtctatacattgttgcatcgtgttaaattttctaatggatctagtattattgggtccaacttctgcctgaaatccaaatatggaagcggatacaaaaccgtttcctggataaaccacacatctccacttttgctttacatcagaaattgtgtcattgacatcttgaactctcctatctaatgccggtgttccacctatagattttgaatattcgaatgctgcatgagtagcattaaattccttaatattgccataattttcatatattgagtaaccctggataaaaagtaaacacaccgcagccgtcgctaccacaataaaaaaaattgatagagagttcatttataatctattagaagctgacaaaatttttttacacgcatcagacaatgctttaataaatagttcaacatctacttttgtcatatcgaaccgatggtatgattctaacctagaattacatccgaaaaagttgactatgttcatagtcattaagtcattaacaaacaacattccagactctggattataagacgatactgtttcgtcacaattacctaccttaatcatgtgattatgaatattggctattagagcaccttctaagaaatctataatatctttgaaacacgatttaaaatcaaaccacgaatatacttctacgaagaaagttagtttacccataggagaaataactataaatggagatctaaatacaaaatccggatctatgatagttttaacattattatattctctattaaatacctccacatctaaaaatgttaattttgaaactatgtcttcgtttattaccgtacctgaactaaacgctataagctctattgtttgagaactctttaaacgatattcttgaaatacatgtaacaaagtttcctttaactcggtcggtttatctaccatagttacagaatttgtatccttatctataatataataatcaaaatcgtataaagttatataattatcgcgttcagattgtgatcttttcaaatagactaaaaaccccatttctctagtaagtatcttatgtatatgtttgtaaaatatcttcatggtgggaatatgctctaccgcagttagccattcctcattgacagcggtagatgtattagacaaaactattccaatgtttaacaagggccattttacgagattattaaatccttgtttgataaatgtagccaatgagggttcgagttcaacgacgattgaattctcttcccgcggatgctgcatgatgaacgacgggatgttgttcgattgatttggaattctttttcgactttttgtttatattaaatattttaaaatttatagctgatagcaattcatgtactacggataatgtagacgcgtattgcgcatcgatatctttattattagataaatttatcaataaatgtgagaagtttgcctcgttaaggtcttccatttaaatattatataaacatttgtgtttgtatcttattcgtcttttatggaatagttttttactagtaaagctgcaattacacactttgtccgtaaaacataaatataaacaccagcttttatcaatcgttccaaaaagtcgacggcggacatttttaacatggcatctattttaaatacacttaggtttttggaaaaaacatcattttataattgtaacgattcaataactaaagaaaagattaagattaaacataagggaatgtcatttgtattttataagccaaagcattctaccgttgttaaatacttgtctggaggaggtatatatcatgatgatttggttgtattggggaaggtaacaattaatgatctaaagatgatgctattttacatggatttatcatatcatggagtgacaagtagtggagcaatttacaaattgggatcgtctatcgatagactttctctaaataggactattgttacaaaagttaataattatgatgatacattttttgacgacgatgattgatcgctattgcacaattttgtttttttactttctaatatagcgtttagattctttttcatgtgcgaatattgatttactaaaatatcgatgtttaacttttgttctatgacgtccttatcagcggtatcggtacatatacgtaattcaccttcacaaaatacggagtcttcgataataatagccaatcgattattggatctagcggtctgtatcatattcaacatgtttaatatatcctttcgtttcccctttacaggcatcgatcgtagcatattttccgcgtctgagatggaaatgttaaaactacaaaaatgcgtaatgttagcccgtcctaatattggtacgtgtctataagtttggcatagtagaataatagacgtgtttaaatgccttccaaagtttaagaattctattagagtattgcattttgatagtttatcgcctacatcatcaaaaataagtaaaaagtgtgctgattttttatgattttgtgcgacagcaatacatttttctatgttacttttagttcgtatcagattatattctagagattcctgactactaacgaaattaatatgatttggccaaatgtatccatcataatctggattataaacgggtgtaaacaagaatatatgtttatattttttaactagtgtagaaaacagagatagtaaatagatagtttttccagatccagatcctcccgttaaaaccattctaaacggcatttttaataaattttctcttgaaaattgtttttcttggaaacaattcataattatatttacagttactaaattaatttgataataaatcaaaatatggaaaactaaggtcgttagtagggaggagaacaaagaaggcatatcgtgatataaataacatttattatcatgatgacaccagaaaacgacgaagagcagacatctgtgttctccgctactgtttacggagacaaaattcagggaaagaataaacgcaaacgcgtgattggtctatgtattagaatatctatggttatttcactactatctatgattaccatgtccgcgtttctcatagtgcgcctaaatcaatgcatgtctgctaacgaggctgctattactgacgccgctgttgccgttgctgctgcatcatctactcatagaaaggttgcgtctagcactacgcaatatgatcacaaagaaagctgtaatggtttatattaccagggttcttgttatatattacattcagactaccagttattctcggatgctaaagcaaattgcactgcggaatcatcaacactacccaataaatccgatgtcttgattacctggctcattgattatgttgaggatacatggggatctgatggtaatccaattacaaaaactacatccgattatcaagattctgatatatcacaagaagttagaaagtatttttgtgttaaaacaatgaactaatatttatttttgtacattaataaatgaaatcgcttaatagacaaactgtaagtaggtttaagaagttgtcggtgccggccgctataatgatgatactctcaaccattattagtggcataggaacatttctgcattacaaagaagaactgatgcctagtgcttgcgccaatggatggatacaatacgataaacattgttatctagataccaacattaaaatgtctacagataatgcggtttatcagtgtcgtaaattacgagctagattgcctagacctgatactagacatctgagagtattgtttagtattttttataaagattattgggtaagtttaaaaaagaccaataataaatggttagatattaataatgataaagatatagatattagtaaattaacaaattttaaacaactaaacagtacgacggatgctgaagcgtgttatatatacaagtctggaaaactggttgaaacagtatgtaaaagtactcaatctgtactatgtgttaaaaaattctacaagtgacaacaaaaaatgaattaataataagtcgttaacgtacgccgccatggacgccgcgtttgttattactccaatgggtgttgactataacagatacattgtatgatgatctcgatatctcaatcatggactttataggaccatacattataggtaacataaaaactgtccaaatagatgtacgggatataaaatattccgacatgcaaaaatgctactttagctataagggtaaaatagttcctcaggattctaatgatttggctagattcaacatttatagcatttgtgccgcatacagatcaaaaaataccatcatcatagcatgcgactatgatatcatgttagatatagaagataaacatcagccattttatctattcccatctattgatgtttttaacgctacaatcatagaagcgtataacctgtatacagctggagattatcatctaatcatcaatccttcagataatctgaaaatgaaattgtcgtttaattcttcattctgcatatcagacggcaatggatggatcataattgatgggaaatgcaatagtaattttttatcataaaagttgtaaagtaaataataaaacaataaatattgaactagtagtacgtatattgagcaatcagaaatgatgctggtacctcttatcacggtgaccgtagttgcgggaacaatattagtatgttatatattatatatttgtaggaaaaagatacgtactgtctataatgacaataaaattatcatgacaaaattaaaaaagataaagagttctaattccagcaaatctagtaaatcaactgatagcgaatcagactgggaggatcactgtagtgctatggaacaaaacaatgacgtagataatatttctaggaatgagatattggacgatgatagcttcgctggtagtttaatatgggataacgaatccaatgttatggcgcctagcacagaacacatttacgatagtgttgctggaagcacgctgctaataaataatgatcgtaatgaacagactatttatcagaacactacagtagtaattaatgaaacggagactgttaaagtacttaatgaagataccaaacagaatcctaactattcatccaatcctttcgtaaattataataaaaccagtatttgtagcaagtcaaatccgtttattacagaacttaacaataaatttagtgagaataatccgtttagacgagcacatagcgatgattatcttaataagcaagaacaagatcatgaacacgatgatatagaatcatcggtcgtatcattggtgtgattagtttcctttttataaaattgaagtaatatttagtattattgctgccgtcacgttgtacaaatggagatattccctgtattcggcatttctaaaattagcaattttattgctaataatgactgtagatattatatagatacagaacatcaaaaaattatatctgatgagatcaatagacagatggatgaaacggtacttcttaccaacatcttaagcgtagaagttgtaaatgacaatgagatgtaccatcttattcctcatagattatcgacgattatactctgtattagttctgtcggaggatgtgttatctctatagataatgacgtcaatggcaaaaatattctaacctttcccattgatcatgctgtaatcatatccccactgagtaaatgtgtcgtagttagcaagggccctacaaccatactggttgctaaagcggatatacccagcaaacgattggtaacatcgtttacaaacgacatactgtatgtaaacaatctatcactgattaattatttgccgttgtctgtattcattattagacgagtcaccgactatttggatagacacatatgcgatcagatatttgctaataataagtggtattcccttataaccatcgacgataagcaatatcctattccatcaaattgtataggtatgtcttctgccaagtacataaattctagcatcgagcaagatactttaatacatgtttgtaacctcgagcatccattcgacttagtatacaaaaaaatgcagtcgtacaattctgtacctatcaaggaacaaatattgtacggtagaattgataatataaatatgagcattagtatttctgtggattaatagatttctagtatggggatcattaatcatctctaatctctaaatacctcataaaacgaaaaaaaagctattatcaaatactgtacggaatagattcattctcttctctttttatgaaactctgttgtatatctactgataaaactggaagcaaaaaatctgataaaaagaataagatcaagatcaaggattatatggaacacgattattataaaataacaatagttcctggttcctcttccacgtctactagctcgtggtattatacacatgcctagtaatagtctctttgcgttgatggaaagcagactagaaataacaggctaaaatgttcagacaccataatagttcccaacccagataataacagagtaccatcaacacattcctttaaactcaatcccaaacccaaaaccgttaaaatgtatccggccaattgatagtagataatgaggtgtacagcgcatgataatttacacagtaaccaaaatgaaaatactttagtaattataagaaatatagatggtaacgtcatcatcaacaatccaataatatgccggagagtaaacattgacggataaaacaaaaatgctccgcataactctatcatggcaataacacaaccaaatacttgtaagattcctaaattagtagaaaatacaacggatatcgatgtataagtgatctcgagaaataataagaataaagtaatgcccgtaaagataaacatcaacattgtttggtaatcattaaaccaattagtatgacgttgaactaatttcacagtaaattttattccagtattatccccgcatgtataagtacctggtaagatatctttatattccataatcaatgagacatcactatctgataacgaatgaagtctagcactagtatgccatttacttaatattgtcgtcttggaagttttattataagttaaaatatcatggttatccaatttccatctaatatactttgtcggattatctatagtacacggaataatgatggtatcattacatgctgtatactctatggtctttgtagttgttataacaaccaacgtatagaggtatatcaacgatattctaactcttgacattttttatttatttaaaatgatacctttgttatttattttattctattttgctaacggtattgaatggcataagtttgaaacgagtgaagaaataatttctacttacttattagacgacgtattatacacgggtgttaatggggcggtatacacattttcaaataataaactaaacaaaactggtttaactaataataattatataacaacatctataaaagtagaggatgcggataaggatacattagtatgcggaaccaataacggaaatcccaaatgttggaaaatagacggttcagacgacccaaaacatagaggtagaggatacgctccttatcaaaatagcaaagtaacgataatcagtcacaacggatgtgtactatctgacataaacatatcaaaagaaggaattaaacgatggagaagatttgacggaccatgtggttatgatttattcacggcggataacgtaattccaaaagatggtttacgaggagcattcgtcgataaagacggtacttatgacaaagtttacattcttttcactgatactatcggctcaaagagaattgttaaaattccgtatatagcacaaatgtgcctaaacgacgaaggtggtccatcatcgttgtctagtcatagatggtcgacgtttctcaaagtcgaattagaatgtgatatcgacggaagaagttatagataaattattcattctaaaactataaaaacagataatgatacgatactatatgtattcttcgatagtccgcattatgtacctattctatgaataccattaaacaatctttttctacgtcaaaattggaaggatatacaaagcaattgccgtctccagctcctggtatatgtctaccagctggaaaagttgttccacataccacgtttgaagtcatagaaaaatataatgtactagatgatattataaagcctttatctaaccaacctatcttcgaaggaccgtctggtgttaaatggttcgatataaaggagaaggaaaatgaacatcgggaatatagaatatacttcataaaagaaaattctatatattcgttcgatacaaaatctaaacaaactcgtagctcgcaagtcgatgcgcgactattttcagtaatggtaacttcgaaaccgttatttatagcagatatagggataggagtaggaatgccacaaatgaaaaaaatacttaaaatgtaatcttaatcgagtacaccacacgacaatgaacaaacataagacagattatgctggttatgcttgctgcgtaatatgcggtctaattgttggaattatttttacagcgacactattaaaagttgtagaacgtaaattagttcatacaccatcaatagataaaacgataaaagatgcatatattagagaagattgtcctactgactggataagctataataataaatgtatccatttatctactgatcgaaaaaacctgggaggaaggacgtaatgcatgcaaagctctaaatccaaattcggatctaattaagatagagactccaaacgagttaagttttttaagaagccttagacgaggctattgggtaggagaatccgaaatattaaaccagacaaccccatataattttatagctaaaaatgccacgaagaatggaactaaaaaacggaaatatatttgtagtacaacgaatactcccaaactgcattcgtgttacactatataacaattacactacatttttatcataacactacttcggttagatgttttagaaaaaaataaatatcgccgtaccgttcttgtttttataaaaataacaattaacaattatcaaattttttctttaatattttacgtggttgaccattcttggtggtaaaataatctcttagtgttggaatggaatgctgtttaatgtttccgcactcatcgtatattttgacgtatgcagtcacatcgtttacgcaatagtcagactgtagttctatcatgcttcctacatcagaaggaggaacagttttaaagtctcttggttttaatctattgccattagttttcatgaaatcctttgttttatccacttcacattttaaataaatgtccactatacattcttctgttaattttactagatcgtcatgggtcatagaatttataggttccgtagtccatggatccaaactagcaaacttcgcgtatacggtatcgcgattagtgtatacaccaactgtatgaaaattaagaaaacagtttaataaatcaacagaaatatttaatcctccgtttgatacagatgcgccatatttatggatttcggattcacacgttgtttgtctgaggtgttcgtctagtgttgcttctacgtaaacttcgattcccatatattctttattgtcagaatcgcataccgatttatcatcatacactgtttgaaaactaaatggtatacacatcaaaataataaataataacgagtacattctgcaatattgttatcgtaattggaaaattagtgttcgagtgagtcggattatgtgagtactggattgtatattttattttatattttgtaataagaataaaatgctaatgtcaagtttattccaatagatgtcttattaaaaaacatatataataaataacaatggctgaatggcataaaattatcgaggatatctcaaaaaataataagttcgaggatgccgccatcgttgattacaagactacaaagaatgttctagctgctattcctaacagaacatttgccaagattaatccgggtgaaattattcctctcatcactaatcgtaatattctaaaacctcttattggtcagaaatattgtattgtatatactaactctctaatggatgagaacacgtatgctatggagttgcttactgggtacgcccctgtatctccgatcgttatagcgagaactcataccgcacttatatttttgatgggtaagccaacaacatccagacgtgatgtgtatagaacgtgtagagatcacgctacccgtgtacgcgcaactggtaattaaaataaaaagtaatattcatatgtagtgtcaattttaaatgatgatgatgaaatggataatatccatattgacgatgtcaataatgccggtattggcatacagctcatcgatttttagatttcattcagaggatgtggaattatgttatgggcatttgtattttgataggatctataatgtagtaaatataaaatataatccgcatattccatatagatataattttattaatcgcacgttaaccgtagatgaactagacgataatgtcttttttacacatggttattttttaaaacacaaatatggttcacttaatcctagtttgattgtctcattatcaggaaacttaaaatataatgatatacaatgctcagtaaatgtatcgtgtctcattaaaaatttggcaacgagtacatctactatattaacatctaaacataagacttattctctacatcggtccacgtgtattactataataggatacgattctattatatggtataaagatataaatgacaagtataatgacatctatgattttactgcaatatgtatgctaatagcgtctacattgatagtgaccatatacgtgtttaaaaaaataaaaatgaactcttaattatgctatgctattagaaatggataaaatcaaaattacggttgattcaaaaattggtaatgttgttaccatatcgtataacttggaaaagataactattgatgttacacctaaaaagaaaaaagaaaaggatgtattattagcgcaatcagttgctgtcgaagaggcaaaagatgtcaaggtagaagaaaaaaatattatcgatattgaagatgacgatgatatggatgtagaaagcgcataatacgatctataaaaataagtatataataaatactttttatttacggtactcttgtagtggtgataccctactcaattatttttttaaaaaaatacttattctgattcttctagccatttccgtgttcgttcgaatgccacatcgacgttaaagataggggagtagttgaaatctagttctgcattgttggtacgcacctcaaatgtagtgttggatatcttcaacgtatagttgttgagtagtgatggttttctaaatagaattctcttcatatcattcttgcacgcgtacatttttagcatccatcttggaattctagatccttgttctattcccaatggtttcatcaatagaagattaaacatatcgtacgaacacgatggagagtaatcgtagcaaaagtaagcatttcctttaatcttagatcccggatactggatatattttgcagccaacacgtgcatccatgcagcatttcctacatatacccggctatgcaccgcgtcatcatcgactgtacgatacataatgttaccgtgttgcttacattgctcgtaaaagactttcgtcaatttgtctccttctccgtaaattccagtgggtcttaggcaacaagtatacaattttgctccattcatgattacggaattattggctttcataaccagttgctcggccatacgtttactttttgcgtatacatgtcctggtgatatatcataaagggtatgctcatggccgatgaatggatcaccgtgtttattgggtcctattgcttccatgctactagtatagatcaaatacttgattcctaggtccacacaagctgccaatatagtctgtgttccataatagtttactttcatgatttcattatcggtgtattttccaaatacatccactagagcagccgtatgaataatcagatttaccccatctagcgcttctctcaccttatcaaagtcgtttatatcacattgtatatagtttataaccttaactttcgaggttattggttgtggatcttctacaatatctatgactctgatttcttgaacatcatctgcactaattaacagttttactatatacctgcctagaaatccggcaccaccagtaaccgcgtacacggccattgctgccactcataatatcagactacttattctattttactaaataatggctgtttgtataatagaccacgataatatcagaggagttatttactttgaaccagtccatggaaaagataaagttttaggatcagttattggattaaaatccggaacgtatagtttgataattcatcgttacggagatattagtcaaggatgtgattccataggcagtccagaaatatttatcggtaacatctttgtaaacagatatggtgtagcatatgtttatttagatacagatgtaaatatatttacaattattggaaaggcgttatctatttcaaaaaatgatcagagattagcgtgtggagttattggtatttcttacataaatgaaaagataatacattttcttacaattaacgagaatggcgtttgatatatcagttaatgcgtctaaaacaataaatgcattagtttacttttctactcagcaaaataaattagtcatacgtaatgaagttaatgatacacactacactgtcgaatttgatagggacaaagtagttgacacgtttatttcatataatagacataatgacaccatagagataagaggggtgcttccagaggaaactaatattggttgcgcggttaatacgccggttagtatgacttacttgtataataagtatagttttaaactgattttagcagaatatataagacacagaaatactatatccggcaatatttattcggcattgatgacactagatgatttggctattaaacagtatggagacattgatctattatttaatgagaaacttaaagtagactccgattcgggactatttgactttgtcaactttgtaaaggatatgatatgttgtgattctagaatagtagtagctctatctagtctagtatctaaacattgggaattgacaaataaaaagtataggtgtatggcattagccgaacatatatctgatagtattccaatatctgagctatctagactacgatacaatctatgtaagtatctacgcggacacactgagagcatagaggatgaatttgattattttgaagacgatgattcgtctacatgttctgccgtaaccgacagggaaacggatgtataattttttttatagcgtgaaggatatgataaaaaatataattgttgtatttatcccattccaatcaccttatatgattctgtaaaaaaattatactgtaacacaataaaggagtcttatagatgtatagaggtcagatactggtttgataaactgtttattccacataagtatgtttgactttatggttagacccgcatactttaacaaatcactgaaaattggagttaggtattgacctctcagaatcagttgccgttctggaacattaaatgtattttttatgatatactccaacgcatttatgtgggcatacaacaagtcattactaatggagtattccaagagttttagttgtctagtatttaacaagagaagagatttcaacagactgtttatgaactcgaacgccgcctcattgtcgcttatattgatgatgtcgaattctcccaatatcatcactgatgagtagctcatcttgttatcgggatccaagttttctaaagatgtcattaaaccctcgatcatgaatggatttatcatcatcgtttttatgttggacatgagcttagtccgtttgtccacatctatagacgacgatttctgaattatttcatatatccctctctttaactccaggaacttgtcaggatggtctactttaatatgttctcgtctaagagatgaaaatctttggatggttgcacgcgacttttctttaaaggatgacgttgcccaagatcctctcttaaatgaatccatcttatccttggacaagatggacagtctattttccttagatggtttaatatttttgttacccatgatctataaaggtagacctaatcgtctcggatgaccatatatttattttcagttttattatacgcataaattgtaaaaaatatgttaggtttacaaaaatgtctcgtggggcattaatcgtttttgaaggattggacaaatctggaaaaacaacacaatgtatgaacatcatggaatctataccggcaaacacgataaaatatcttaactttcctcagagatccactgtcactggaaagatgatagatgactatctaactcgtaaaaaaacctataatgatcatatagttaatctattattttgtgcaaatagatgggagtttgcatcttttatacaagaacaactagaacagggaattactttaatagttgatagatacgcattttctggagtagcgtatgccgccgctaaaggcgcgtcaatgactctcagtaagagttatgaatctggattgcctaaacccgacttagttatattcttggaatctggtagcaaagaaattaatagaaacgtcggcgaggaaatttatgaagatgttacattccaacaaaaggtattacaagaatataaaaaaatgattgaagaaggagatattcattggcaaattatttcttctgaattcgaggaagatgtaaagaaggagttgattaagaatatagttatagaggctatacacacggttactggaccagtggggcaactgtggatgtaatagtgaaattacattttttataaatagatgttagtacagtgttataaatggatgaagcatattactctggcaacttggaatcagtactcggatacgtgtccgatatgcataccgaactcgcatcaatatctcaattagttattgccaagatagaaactatagataatgatatattaaacaaggacattgtaaattttatcatgtgtagatcaaacttggataatccatttatctctttcctagatactgtatatactattatagatcaagagatctatcagaccgaattgattaattcattagacgacaatgaaattatcgattgtatagttaacaagtttatgagcttttataaggataacctagaaaatatagtagatgctatcattactctaaaatatataatgaataatccagattttaaaactacgtatgccgaagtactcggttccagaatagccgatatagatattaaacaagtgatacgtaagaatatactacaattgtctaatgatatccgcgaacgatatttgtgaaaaatattaaaaaaaaatactttttttattaaatgacgtcgcttcgcgaatttagaaaattatgctgtgatatatatcacgcatcaggatataaagaaaaatctaaattaattagagactttataacagatagggatgataaatatttgatcattaagctattgcttcccggattagacgatagaatttataacatgaacgataaacaaattataaaattatatagtataatatttaaacaatctcaggaagatatgctacaagatttaggatacggatatataggagacactattaggactttcttcaaagagaacacagaaatccgtccacgagataaaagcattttaactttagaagaagtggatagttttttaactacgttatcatccgtaactaaagaatcgcatcaaataaaattattgactgatgtagcatctgtttgtacatgtaatgatttaaaatgtgtagtcatgcttattgataaagatctaaaaattaaagcgggccctcggtacgtacttaacgctattagtcctcatgcctatgatgtgtttagaaaatctaataacttgaaagagataatagaaaatgcatctaaacaaaatctagactctatatctatttctgttatgactccaattaatcccatgttagcggaatcgtgtgattctgtcaataaggcgtttaaaaaatttccatcaggaatgtttgcggaagtcaaatacgatggtgaaagagtacaagttcataaaaataataacgagtttgccttctttagtagaaacatgaaaccagtactctctcataaagtggattatctcaaagaatacataccgaaagcatttaaaaaagctacgtctatcgtattggattctgaaattgttcttgtagacgaacataatgtaccgctaccgtttggaagtttaggaatacacaaaaagaaagaatataaaaactctaacatgtgtttgttcgtgtttgactgtttgtactttgatggattcgatatgacggacattccattgtacgaacgaagatcttttctcaaagatgttatggttgaaatacccaatagaatagtattctcagagttgacgaatattagtaacgagtctcagttaactgacgtattggatgatgcactaacgagaaaattagaaggattggtcttaaaagatattaatggagtatacgaaccgggaaagagaagatggttaaaaataaagcgagactatttgaacgagggttccatggcagattctgccgatttagtagtactaggtgcctactatggtaaaggagcaaagggtggtatcatggcagtctttctaatgggttgttacgacgatgaatccggtaaatggaagacggttaccaagtgttcaggacacgatgataatacgttaagggagttgcaagaccaattaaagatgattaaaattaacaaggatcccaaaaaaattccagagtggttagtagttaataaaatctatattcccgattttgtagtagaggatccgaaacaatctcagatatgggaaatttcaggagcagagtttacatcttccaagtcccataccgcaaatggaatatccattagatttcctagatttactaggataagagaggataaaacgtggaaagaatctactcatctaaacgatttagtaaacttgactaaatcttaatagttacatacaaactgaaaattaaaataacaccatttagttggtggtcgccatggatggtgttattgtatactgtctaaacgcgttagtaaaacatggcgaggaaataaatcatataaaaaatgatttcatgattaaaccatgttgtgaaagagtttgtgaaaaagtcaagaacgttcacattggcggacaatctaaaaacaatacagtgattgcagatttgccatatatggataatgcggtatccgatgtatgcaattcactgtataaaaagaatgtatcaagaatatccagatttgctaatttgataaagatagatgacgatgacaagactcctactggtgtatataattattttaaacctaaagatgttattcctgttatcatatctataggaaaggataaagatgtctgtgaactattaatctcatcagacatatcgtgtgcatgcgtggagttaaattcatatcacgtagccattcttcccatgaatgtttccttttttaccaaaggaaatgcctcgttgattattctcctgtttgatttctctatcgatgcagcacctctcttaagaagtgtaaccgataataatgttattatatctagacaccagcgtctacatgacgagcttccgagttccaattggttcaagttttacataagtataaagtccgactattgttctatattatatatggttgttgatggatctgtgatgcatgcgatagctgataatagaactcacgcaattattagcaaaaatatattagacaatactacaattaacgatgagtgtagatgctgttattttgaaccacagattaggattcttgatagagatgagatgctcaatggatcatcgtgtgatatgaacagacattgtattatgatgaatttacctgatgtaggcgaatttggatctagtatgttggggaaatatgaacctgacatgattaagattgctctttcggtggctggtaatttaataagaaatcgagactacattcccgggagacgaggctatagctactacgtttacggtatagcctctagataatttttttaagcacgaaataaaaaacataattttaaaccaatctatttcatactattttgtgtgatcaccatggacataaagatagatattagtatttctggtgataaatttacggtgactactaggagggaaaatgaagaaagaaaaaaatatctacctctccaaaaagaaaaaactactgatgttatcaaacctgattatcttgagtacgatgacttgttagatagagatgagatgtttactattctagaggaatattttatgtacagaggtctattaggcctcagaataaaatatggacgactctttaacgaaattaaaaaattcgacaatgatgcggaagaacaattcggtactatagaagaactcaagcagaaacttagattaaattctgaagagggagcagataactttatagattatataaaggtacaaaaacaggatatcgtcaaacttactgtatacgattgcatatctatgataggattgtgtgcatgcgtggtagatgtttggagaaatgagaaactgttttctagatggaaatattgtttacgagcgattaaactgtttattaatgatcacatgcttgataagataaaatctatactgcagaatagactagtatatgtggaaatgtcatagaaagttaatgagagcaaaaatatataaggttgtattccatatttgttattttttctgtaatagttaaaaaaatacattcgatggtctatctatcagattattatgtgttataaggtactttttctcataataaactagagtatgagtaagatagtgtttttcaaaacatataaatctaaaattgatggatgagatatacagctattaatttcgaaaatatataaatctaaaattgatggataagatatacagctattaatttcgaaaatatattttaatctgataactttaaacatggatttttgatggtggtttaacgttttaaaaaaagattttgttattgtagtatatgataatattaaaagatggatataaagaatttgctgactgcatgtactattttttacattactacattggctacggcagatatacctactccgccaccaacgggtcatgtgacaagggagaatatcttgataagaggcataatcaatgttgtaatcggtgtccacctggagaatttgccaaggttagatgtaatggtaacgataacacaaaatgtgaacgctgcccacctcatacatataccacaatccccaattattctaatggatgtcatcaatgtagaaaatgcccaaccggatcatttgataaggtaaagtgtaccggaacacagaacagtaaatgttcgtgtcttcctggttggtattgcgctactgattcttcacagactgaagattgttgaaattgtgtaccaaaaaggagatgtccatgcggatactttggtggaatagatgaacaaggaaatcctatttgtaaatcgtgctgtattggtgaatattgcaactacctacgtaattatagacttgatccattttctccatgcaaactatctaaatgtaattaattatgattttgatgataatgttaccatacattatatcgctacttggttagtgtattattcagtatgaagacctattaataattacttatcttttgacgatcttgttataattataatataaaaacttatggcatagtaactcataattgctgacgcgataaattcgtaataatctgttttgttcaaatttttataaggaatctacaggcataaaaataaaaatataatttataatatactcttacagcgcgccatcatgaatagcagcagtaaattaattgctgttattaatggatttagaaatagtggacgattttgtgatattaatatagttattaatgatgaaaggataaacgctcacagactcatcctatctggagcctccgaatatttttccattctgttttccaataattttatcgattctaatgaatacgaagttaatctaagtcatttagattatcaaagtgttaacgatttgatcgattacatttatgggatacctttgagcctaactaacgataacgtgaaatatattctttcaaccgctgattttttacaaattggatctgccattactgagtgcgaaaaatacatacttaaaaatctttgttctagaaactgtatcgatttctacatatacgctgataaatataataacaagaaaatagaatcagcgtcgtttaacacaatattacgaaatattttgagactcatcaacgatgaaaactttaaatacttaacagaggaatcaatgataaaaattttaagcgatgatatgttaaatataaaaaatgaggattttgcaccactaattctcattaaatggttagagagtactcaacaatcatgcaccgtcgagttacttagatgcctcagaatatcattgctttccccacaagttataaaatcactttatagtcatcaactggttagttcaatctacgaatgtataacattcttaaacaatatagcattcttggatgaatcatttcctagataccatagcatcgagttgatatctatcggtataagtaattcgcatgataagatttccataaactgctacaatcataaaaaaaatacatgggaaatgatatcttcacgtagatataggtgtagtttcgcagtggccgtcctggataatattatctatatgatgggtggatatgatcagtccccgtatagaagttcaaaggttatagcgtacaatacatgtacaaattcttggatatatgatataccagagctaaaatatcctcgttctaattgtgggggactggctgatgacgaatacatttattgtataggcggcatacgcgatcaggattcatcgttgacatctagtattgatagatggaagccatcaaaaccatattggcagaagtatgctaaaatgcgcgaaccaaaatgtgatatgggggttgcgatgttaaacggattaatatatgtcatgggtggaatcgttaaaggtgacacgtgtaccgacgcactagagagtttatcagaagatggatggatgaagcatcaacgtcttccaataaaaatgtccaatatgtcgacgattgttcatgatggcaagatttatatatctggaggttacaacaatagtagtgtagttaatgtaatatcgaatctagtccttagctataatccgatatatgatgaatggaccaaattatcatcattaaacattcctagaattaatcccgctctatggtcagcgcataataaattatatgtaggaggaggaatatctgatgatgttcgaactaatacatctgaaacatacgataaagaaaaagattgttggacattggataatggtcacgtgttaccacgcaattatataatgtataaatgcgaaccgattaaacataaatatccattggaaaaaacacagtacacgaatgattttctaaagtatttggaaagttttataggtagttgatagaacaaaatacataattttgtaaaaataaatcactttttatactaatatgacacgattaccaatacttttgttactaatatcattagtatacgctacaccttttcctcagacatctaaaaaaataggtgatgatgcaactctatcatgtaatcgaaataatacaaatgactacgttgttatgagtgcttggtataaggagcccaattccattattcttttagctgctaaaagcgacgtcttgtattttgataattataccaaggataaaatatcttacgactctccatacgatgatctagttacaactatcacaattaaatcattgactgctagagatgccggtacttatgtatgtgcattctttatgacatcaactacaaatgacactgataaagtagattatgaagaatactccacagagttgattgtaaatacagatagtgaatcgactatagacataatactatctggatctacacattcaccagaaactagttctgagaaaccagaggatatagataattttaattgctcgtcggtattcgaaatcgcgactccggaaccaattactgataatgtagaagatcatacagacaccgtcacatacactagtgatagcattaatacagtaagtgcatcatctggagaatccacaacagacgagactccggaaccaattactgataaagaagaagatcatacagtcacagacactgtctcatacactacagtaagtacatcatctggaattgtcactactaaatcaaccaccgatgatgcggatctttatgatacgtacaatgataatgatacagtaccaccaactactgtaggcggtagtacaacctctattagcaattataaaaccaaggactttgtagaaatatttggtattaccgcattaattatattgtcggccgtggcaatattctgtattacatattatatatataataaacgttcacgtaaatacaaaacagagaacaaagtctagatttttgacttacataaatgtctgggatagtaaaatctatcatattgagcggaccatctggttcaggaaagacagccatagccaaaagactatgggaatatatttggatttgtggtgtcccataccactagatttcctcgtcctatggaacgagaaggtgtcgattaccattacgttaacagagaggccatctggaagggaatagccgccggaaactttctagaacatactgagtttttaggaaatatttacggaacttctaaaactgctgtgaatacagcggctattaataatcgtatttgtgtgatggatctaaacatcgatggcgttagaagtcttaaaaatacgtacctaatgccttactcggtgtatataagacctacctctcttaaaatggttgagaccaagcttcgttgtagaaacactgaagcggatgatgagattcatcgtcgtgtgatgttggcaaaaactgacatggatgaggcaggtgaagccggtctattcgacactattatcattgaagatgatgtgaatttagcatatagtaagttaattcagatactacaggaccgtattagaatgtattttaacactaattagagacttaagacttaaaacttgataattaataatataactcgtttttatatgtggctatttcaacgtctaatgtattagttaaatattaaaacttaccacgtaaaacttaaaatttaaaatgatatttcattgacagatagatcacacattatgaactttcaaggacttgtgttaactgacaattgcaaaaatcaatgggtcgttggaccattaataggaaaaggtggattcggtagtatttatactactaatgacaataattatgtagtaaaaatagagcccaaagctaacggatcattatttaccgaacaggcattttatactagagtacttaaaccatccgttatcgaagaatggaaaaaatctcacaatataaagcacgtaggtcttatcacgtgcaaggcatttggtctatacaaatccattaatgtggaatatcgattcttggtaattaatagattaggtgcagatctagatgcggtgatcagagccaataataatagattaccaaaaaggtcggtgatgttgatcggaatcgaaatcttaaataccatacaatttatgcacgagcaaggatattctcacggagatattaaagcgagtaatatagtcttggatcaaatagataagaataaattatatctagtggattacggattggtttctaaattcatgtctaatggcgaacatgttccatttataagaaatccaaataaaatggataacggtactctagaatttacacctatagattcgcataaaggatacgttgtatctagacgtggagatctagaaacacttggatattgtatgattagatggttgggaggtatcttgccatggactaagatatctgaaacaaagaattgtgcattagtaagtgccacaaaacagaaatatgttaacaatactgcgactttgttaatgaccagtttgcaatatgcacctagagaattgctgcaatatattaccatggtaaactctttgacatattttgaggaacccaattacgacgagtttcggcacatattaatgcagggtgtatattattaagtgtggtgtttggtcgatgtaaaatttttgtcgataaaaattaaaaaataacttaatttattattgatctcgtgtgtacaaccgaaatcatggcgatgttttacgcacacgctctcggtgggtacgacgagaatcttcatgcctttcctggaatatcatcgactgttgccaatgatgtcaggaaatattctgttgtgtcagtttataataacaagtatgacattgtaaaagacaaatatatgtggtgttacagtcaggtgaacaagagatatattggagcactgctgcctatgtttgagtgcaatgaatatctacaaattggagatccgatccatgatcaagaaggaaatcaaatctctatcatcacatatcgccacaaaaactactatgctctaagcggaatcgggtacgagagtctagacttgtgtttggaaggagtagggattcatcatcacgtacttgaaacaggaaacgctgtatatggaaaagttcaacatgattattctactatcaaagagaaggccaaagaaatgaatgcactcagttcaggacctatcatcgattaccacgtctggataggagattgtatctgtcaagttactgctgtggacgtacatggaaaggaaattatgagaatgagattcaaaaagggtgcggtgctacagatcccaaatctggtaaaagttaaacttggggagaatgatacagaaaatctttcttctactatatcggcggcaccatcgaggtaaccacctctcaagaagaccgcgtgaataatgtactcatgaaacgtttggaaactatacgccatatgtggtctgttgtatatgatcattttgatattgtgaatggtaaagaatgctgttatgtgcatacgcattcatctaatcaaaatcctataccgagtactgtaaaaacaaatttgtacatgaagactatgggatcatgcattcaaatggattccatggaagctctagagtatcttagcgaactgaaggaatcaggtggatggagtcccagaccagaaatgcaggaatttgaatatccagatggagtggaagacactgaatcaattgagagattggtagaggagttcttcaatagatcagaacttcaggctggtaaattagtcaaatttggtaattctattaattgttaaacatacatctgtttcagctaagcaactaagaacacgtatacggcagcagcttccttttatactctcatcttttaccaacacaaagggtggatatttgttcattggagttgataataatacacacaaagtatttggattcacggtgggttacgactacctcagactgatagagaatgatatagaaaagcatatcaaaagactttgtgttgtgcatttctgtgagaagaaagaggacatcaagtacacgtgtcgattcatcaaggtatataaacctggggatgaggctacctcgacatacgtgtgcgctatcaaagtggaaagatgctgttgtgctgtgtttgcagattggccagaatcatggtatatggatactaatggtatcaagaagtattctccagatgaatgggtgtcacatataaaattttaattaatgtaactatagagaacaaataataggttgtaatatcatatagacaataactaacaattaattagtaactgttatctcttttttaactaaccaactaactatatacctattaatacatcgtaattatagttcttaacatctattaatcattgattcgcttctttaattttttataaactaacattgttaattgaaaagggataacatgttacagaatataaattatatatggatttttttaaaaaggaaatacttgactggagtgtatatttatctcttcattatatagcacgcgtgtgttccaattcttccacatcccatataatacaggattataatctcgttcgaacatacgagaaagtggataaaacaatagttgattttttatctaggttgccaaatttattccatattttagaatatggggaaaatattctacatatttattctatggatgatgctaatacgaatattataattttttttctagatagagtattaaatattaataagaacgggtcatttatacacaatctcaggttatcatcatccattaatataaaagaatatgtatatcaattagttaataatgatcatccagataataggataagactaatgcttgaaaatggacgtagaacaagacattttttgtcctatatatcagatacagttaatatctatatatgtattttaataaatcatggattttatatagatgcagaagacagttacggttgtacattattacatagatgtatatatcactataagaaatcagaatcagaatcatacaatgaattaattaagatattgttaaataatggatccgatgtagataaaaaagatacgtacggaaacacaccttttatcctattatgtaaacacgatatcaacaacgtggaattgtttgagatatgtttagagaatgctaatatagactctgtagactttaatagatatacacctcttcattatgtctcatgtcgtaataaatatgattttgtaaagttattaatttctaaaggagcaaatgttaatgcgcgtaataaattcggaactactccattttattgtggaattatacacggtatctcgcttataaaactatatttggaatcagacacagagttagaaatagataatgaacatatagttcgtcatttaataatttttgatgctgttgaatctttagattatctattatccagaggagttattgatattaactatcgtactatatacaacgaaacatctatttacgacgctgtcagttataatgcgtataatacgttggtctatctattaaacagaaatggtgattttgagacgattactactagtggatgtacatgtatttcggaagcagtcgcaaacaacaacaaaataataatggaagtactattgtctaaacgaccatctttgaaaattatgatacagtctatgatagcaattactaaaaataaacaacataatgcagatttattgaaaatgtgtataaaatatactgcgtgtatgaccgattatgatactcttatagatgtacagtcgctacagcaatataaatggtatattttaaaatgtttcgatgaaatagatatcatgaagagatgttatataaaaaataaaactgtattccaattagttttttgtatcaaagacattaatactttaatgagatatggtaaacatccttctttcgtgaagtgcactagtctcgacgtatacggaagtcgtgtacgtaatatcatagcatctattagatatcgtcagagattaattagtctattatccaagaagctggatgcgggagataaatggtcgtgttttcctaacgaaataaaatataaaatattggaaaactttaacgataacgaactatccacatatctaaaaatcttataaacactattaaaatataaaatctaagtaggataaaatcacactacatcattgtttccttttagtgctcgacagtgtatactatttttaacactcataaataaaaatgaaaacgatttccgttgttacgttgttatgcgtactacctgctgttgtttattcaacatgtactgtacccactatgaataacgctaaattaacgtctaccgaaacatcgtttaatgataaacagaaagttacatttacatgtgatcagggatatcattctttggatccaaatgctgtctgcgaaacagataaatggaaatacgaaaatccatgcaagaaaatgtgcacagtttctgattatgtctctgaattatatgataagccattatacgaagtgaattccaccatgacactaagttgcaacggcgaaacaaaatattttcgttgcgaagaaaaaaatggaaatacttcttggaatgatactgttacgtgtcctaatgcggaatgtcaacctcttcaattagaacacggatcgtgtcaaccagttaaagaaaaatactcatttggggaatatatgactatcaactgtgatgttggatatgaggttattggtgcttcgtacataagttgtacagctaattcttggaatgttattccatcatgtcaacaaaaatgtgatataccgtctctatctaatggattaatttccggatctacattttctatcggtggcgttatacatcttagttgtaaaagtggttttatactaacgggatctccatcatccacatgtatcgacggtaaatggaatcccatactcccaacatgtgtacgatctaacgaaaaatttgatccagtggatgatggtcccgacgatgagacagatttgagcaaactctcgaaagacgttgtacaatatgaacaagaaatagaatcgttagaagcaacttatcatataatcatagtggcgttaacaattatgggcgtcatatttttaatctccgttatagtattagtttgttcctgtgacaaaaataatgaccaatataagttccataaattgctaccgtaaatataaatccgttaaaataattaataatttaataacaaacaagtatcaaaagattaaagacttatagctagaatcaattgagatgtcttcttcagtggatgttgatatctacgatgccgttagagcatttttactcaggcactattataacaagagatttattgtgtatggaagaagtaacgccatattacataatatatacaggctatttacaagatgcgccgttataccgttcgatgatatagtacgtactatgccaaatgaatcacgtgttaaacaatgggtgatggatacacttaatggtataatgatgaatgaacgcgatgtttctgtaagcgttggcaccggaatactattcatggaaatgtttttcgattacaataaaaatagtatcaacaatcaactaatgtatgatataattaatagcgtatctataattctagctaatgagagatatagaagcgcttttaacgacgatggtatatacatccgtagaaatatgattaacaagttgtacggatacgcatctctaactactattggcacgatcgctggaggtgtttgttattatctgttgatgcatctagttagtttgtataaataattatttcaatatactagttaaaattttaagattttaaatgtataaaaaactaataacgtttttatttgtaataggtgcattagcatcctattcgaataatgagtacactccgtttaataaactgagtgtaaaactctatatagatggagtagataatatagaaaattcatatactgatgataataatgaattggtgttaaattttaaagagtacacaatttctattattacagagtcatgcgacgtcggatttgattccatagatatagatgttataaacgactataaaattattgatatgtataccattgactcgtctactattcaacgcagaggtcacacgtgtagaatatctaccaaattatcatgccattatgataagtacccttatattcacaaatatgatggtgatgagcaacaatattctattactgcagagggaaaatgctataaaggaataaaatatgaaataagtatgatcaacgatgatactctattgagaaaacatactcttaaaattggatctacttatatatttgatcgtcatggacatagtaatacatattattcaaaatatgatttttaaaaatttaaaatatattatcacttcagtgacagtagtcaaataacaaacaacaccatgagatatattataattctcgcagttttgttcattaatagtatacacgctaaaataactagttataagtttgaatccgtcaattttgattccaaaattgaatggactggggatggtctatacaatatatcccttaaaaattatggcatcaagacgtggcaaacaatgtatacaaatgtaccagaaggaacatacgacatatccgcatttccaaagaatgatttcgtatctttctgggttaaatttgaacaaggcgattataaagtggaagagtattgtacgggactatgcgtcgaagtaaaaattggaccaccgactgtaacattgactgaatacgacgaccatatcaatttgtacatcgagcatccgtatgctactagaggtagcaaaaagattcctatttacaaacgcggtgacatgtgtgatatctacttgttgtatacggctaacttcacattcggagattctaaagaaccagtaccatatgatatcgatgactacgattgcacgtctacaggttgcagcatagactttgtcacaacagaaaaagtgtgcgtgacagcacagggagccacagaagggtttctcgaaaaaattactccatggagttcgaaagtatgtctgacacctaaaaagagtgtatatacatgcgcaattagatccaaagaagatgttcccaatttcaaggacaaaatggccagagttatcaagagaaaatttaataaacagtctcaatcttatttaactaaatttctcggtagcacatcaaatgatgttaccacttttcttagcatgcttaacttgactaaatattcataactaatttttattaatgatacaaaaacgaaataaaactgcatattatacactggttaacgcccttataggctctaaccattttcaagatgaggtccctgattatagtccttctgttcccctctatcatctactccatgtctattagacgatgtgagaagactgaagaggaaacatggggattgaaaatagggttgtgtataattgccaaagatttctatcccgaaagaactgattgcagtgttcatctcccaactgcaagtgaaggattgataactgaaggcaatggattcagggatatacgaaacaccgataaattataaaaaaagcaatgtgtccgctgtttccgttaataatactattttcgtaactggcggattattcataaataactctaatagcacgatcgtggttaacaatatggaaaaacttgacatttataaagacaaacaatggtcgattatagaaatgcctatggctagggtatatcacggcatcgactcgacatttggaatgttatattttgccggaggtctatccgttaccgaacaatatggtaatttagagaaaaacaacgagatatcttgttacaatcctagaacgaataagtggtttgatatttcatatactatttataagatatccatatcatcattgtgtaaactaaataacgtcttctatgtatttagtaaggacattggatatgtggaaaagtatgatggtgcatggaagttagtacatgatcgtctccccgctataaaggcattatcaacttctccttattgattgaaaatgaaaatataaatagtttttatgtatagcagtattaccctatagttttattgcttactactaacatggatacagatgttacaaatgtagaagatatcataaatgaaatagatagagagaaagaagaaatactaaaaaatgtagaaattgaaaataataaaaacattaacaagaatcatccaagtggatatattagagaagcactcgttattaatacaagtagtaatagtgattccattgataaagaagttatagaatgtatcagtcacgatgtaggaatatagatcatatctactaatttttataatcgatacaaaacataaaaaacaactcgttattacatagcaggcatggaatccttcaagtattgttttgataacgatggcaagaaatggattatcggaaatactttatattctggtaattcaatactatataaggtcagaaaaaatttcactagttcgttctacaattacgtaatgaaaatagatcacaaatcacacaagccattgttgtctgaaatacgattctatatatctgtattggatcctttgactatcgacaactggacacgggaacgtggtataaagtatttggctattccagatctgtatggaattggagaaaccgatgattatatgttcttcgttataaagaattcgggaagagtattcgccccaaaggatactgaatcagtcttcgaagcatgcgtcactatgataaacacgttagagtttatacactctcgaggatttacccatggaaaaatagaaccgaggaatatactgattagaaataaacgtctttcactaattgactattctagaactaacaaactatacaagagtggaaactcacatatagattacaacgaggacatgataacttcaggaaatatcaattatatgtgtgtagacaatcatcttggagcaacagtttcaaaacgaggagatttagaaatgttgggatattgcatgatagaatggttcggtggcaaacttccatggaaaaacgaaagtagtataaaagtaataaaacaaaaaaaagaatataaaaaatttatagctactttctttgaggactgttttcctgaaggaaatgaacctctggaattagttagatatatagaattagtatacacgttagattattctcaaactcctaattatgacagactacgtaaactgtttatacaagattgaaattatattctttttttatagagtgtggtagtgttacggatatctaatattaatattagactatctctatcgcgctacacgaccaatatcgattactatggatatcttcagggaaatcgcatcttctatgaaaggagagaatgtattcatttctccagcgtcaatctcgtcagtattgacaatactgtattatggagctaatggatccactgctgaacagctatcaaaatatgtagaaacggaggagaacacggataaggttagcgctcagaatatctcattcaaatccatgaataaagtatatgggcgatattctgccgtgtttaaagattcctttttgagaaaaattggcgataagtttcaaactgttgacttcactgattgtcgcactatagatgcaatcaacaagtgtgtagatatctttactgaggggaaaatcaatccactattggatgaaccattgtctcctgatacctgtctcctagcaattagtgccgtatactttaaagcaaaatggttgatgccattcgaaaaggaatttaccagtgattatcccttttacgtatctccgacggaaatggtagatgtaagtatgatgtctatgtacggcaaggcatttaatcacgcatctgtaaaggaatcattcggcaacttttcaatcatagaactgccatatgttggagatactagtatgatggtcattcttccagacaagattgatggattagaatccatagaacaaaatctaacagatacaaattttaagaaatggtgtaactctctggaagctacgtttatcgatgttcacattcccaagtttaaggtaacaggttcgtataatcttgtggatactctagtaaagtcaggactgacagaggtgttcggttcaactggagattatagcaatatgtgtaattcagatgtgagtgtcgacgctatgattcacaaaacgtatatagatgtcaatgaagagtatacagaagcagctgcagcaacttgtgcactggtgtcagactgtgcatcaacaattacaaatgagttctgtgtagatcatccgttcatctatgtgattaggcatgttgatggaaaaattcttttcgttggtagatattgctctccgacaactaattgttaaccattttttttaaaaaaatagaaaaaacatgtggtattagtgcaggtcgttgttcttccaattgcaattggtaagatgacggccaactttagtacccacgtcttttcaccacagcactgtggatgtgacagactgaccagtattgatgacgtcagacaatgtttgactgaatatatttattggtcgtcctatgcataccgcaacaggcaatgcgctggacagttgtattccacactcctctcttttagagatgatgcggaatcagtgttcatcgacattcgcgagctggtaaaaaatatgccgtgggatgatgtcaaagattgtacagaaatcatccgttgttatataccggatgagcaaaaaaccatcagagagatttcggccatcatcggactttgtgcatatgctgctacttactggggaggtgaagaccatcccactagtaacagtctgaacgcattgtttgtgatgcttgagatgctcaattacgtggattataacatcatattccggcgtatgaattgatgagttgtacatcttgacattttctttcttctcttctccctttcttctcttctcccttcctccctcttctccctttcccagaaacaaacttttttacccactataaaataaaatgagtatactacctattatatttcttcctatatttttttattcttcattcgttcagacttttaacgcgcctgaatgtatcgacaaagggcaatattttgcatcattcatggagttagaaaacgagccagtaatcttaccatgtcctcaaataaatacgctatcatccggatataatatattagatattttatgggaaaaacgaggagcggataatgatagaattataccgatagataatggtagcaatatgctaattctgaacccgacacaatcagactctggtatttatatatgcattaccacgaacgaaacctactgtgacatgatgtcgttaaatttgacaatcgtgtctgtctcagaatcaaatatagatcttatctcgtatccacaaatagtaaatgagagatctactggcgaaatggtatgtcccaatattaatgcatttattgctagtaacgtaaacgcagatattatatggagcggacatcgacgccttagaaataagagacttaaacaacggacacctggaattattaccatagaagatgttagaaaaaatgatgctggttattatacatgtgttttagaatatatatacagaggtaaaacatataacgtaaccagaattgtaaaattagaggtacgggataaaataataccttctactatgcaattaccagatggcattgtaacttcaataggtagtaatttgactattgcgtgtagagtatcgttgagacctcccacaacggatgcagacgtcttttggataagtaatggtatgtattacgaagaagatgatggggacggagacggtagaataagtgtagcaaataaaatctatatgaccgataagagacgtgttattacatcccggttaaacattaatcctgtcaaggaagaagatgctacaacgtttacgtgtatggcgtttactattcctagcatcagcaaaacagttactgttagtataacgtgaatgtatgttgttacatttccatgtcaattgagtttataagaatttttatacattatcttccaacaaacaattgacgaacgtattgctatgattaactcccacgatactatgcatattattaatcattaacttgcagactatacctagtgctattttgacatactcatgttcttgtgtaattgcggtatctatattattaaagtacgtaaatctagctatagttttattatttaattttagataatataccgtctccttatttttaaaaattgccacatcctttattaaatcatgaatgggaatttctatgtcatcgttagtatattgtgaacaacaagagcagatatctataggaaagggtggaatgcgatacattgatctatgtagttttaaaacacacgcgaactttgaagaatttatataaatcattccatcgatacatccttctatgttgacatgtatatatccaggaattcttttattaatgtcaggaaatgtataaactaaaacattgcccgaaagcggtgcctctatctgcgttatatccgttcttaacttacaaaatgtaaccaatacctttgcatgacttgttttgttcggcaacgttagtttaaacttgacgaatggattaattacaatagcatgatccgcgcatctattaagtttttttactttaacgcccttgtatgtttttacagagactttatctaaatttctagtacttgtatgtgttataaatataacgggatatagaactgaatcacctaccttagatacccaattacattttatcagatccagataataaacaaattttgtcgccctaactaattctatattgttatatattttacaattggttatgatatcatgtaataacttggagtctaacgcgcatcgtcgtacgtttatacaattgtgatttagtgtagtatatctacacatgtatttttccgcactatagtattctggactagtgataaaactatcgttatatctgtcttcaatgaactcatcgagatattgctctctgtcatattcatacacctgcataaactttctagacatcttacaatccgtgttattttaggatcatatttacatatttacgggtatatcaaagatgttagattagttaatgggaatcgtctataataatgaatattaaacaattatatgaggacttttaccacaaagcatcataaaaatgagtcgtcgtctgatttatgttttaaatatcaaccgcaaatcaactcataaaatacaagagaatgaaatatatacatattttagtcattgcaatatagaccatacttctacagaacttgattttgtagttaaaaactatgatctaaacagacgacaacatgtaactgggtatactgcactacactgctatttgtataataattactttacaaacgatgtactgaagatattattaaatcatgacgtaaatgtaacgatgaaaaccagtagcggacgtatgcctgtttatatattgcttactagatgttgcaatatttcacatgatgtagtgatagatatgatagacaaagataaaaaccacttattacatagagactattccaacctattactagagtatataaaatctcgttacatgttattaaaggaagaggatatcgatgagaacatagtatccactttattagataagggaatcgatcctaactttaaacaagacggatatacagcgttacattattattatttgtgtctcgcacacgtttataaaccaggtgagtgtagaaaaccgataacgataaaaaaggccaagcgaattatttctttgtttatacaacatggagctaatctaaacgcgttagataattgtggtaatacaccattccatttgtatcttagtattgaaatgtgtaataatattcatatgactaaaatgctgttgacttttaatccgaatttcaaaatatgtaataatcatggattaacgcctatactatgttatataacttccgactacatacaacacgatattcttgttatgttaatacatcactatgaaacaaatgttggagaaatgccgatagatgagcgtcgtatgatcgtattcgagtttatcaaaacatattctacacgtccggcagattcgataacttatttgatgaataggtttaaaaatataaatatttatacccgctatgaaggaaagacattattacacgtagcatgtgaatataataatacacacgtaatagattatcttatacgtatcaacggagatataaatgcgttaaccgacaataacaaacacgctacacaactcattatagataacaaagaaaattccccgtataccatcgattgtttactgtatatacttagatatattgtagataagaatgtgataagatcgttggtggatcaacttccatctctacctatcttcgatataaaatcatttgagaaattcatatcctactgtatacttttagatgacacattttacgataggcacgttaagaatcgcgattctaaaacgtatcgatacgcattttcaaaatacatgtcgtttgataaatacgatggtataataactaaatgtcacgacgaaacaatgttactcaaactgtccactgttctagacactacactatatgcagttttaagatgccataattcgaaaaagttaagaagatacctcaacgagttaaaaaaatataataacgataagtcctttaaaatatattctaatattatgaatgagagataccttaatgtatattataaagatatgtacgtgtcaaaggtatatgataaactatttcctgttttcacagataaaaattgtctactaacattactaccttcagaaattatatacgaaatattatacatgctgacaattaacgatctttataatatatcgtatccacctaccaaagtatagttgtatttttctcatgcgatgtgtgtaaaaaaactgatattatataaatattttagtgccgtataataaagatgacgatgaaaatgatggtacatatatatttcgtatcattattgttattgctattccacagttacgccatagacatcgaaaatgaaatcacagaattcttcaataaaatgagagatactctaccagctaaagactctaaatggttgaatccagcatgtatgttcggaggcacaatgaatgatatagccgctctaggagagccattcagcgcaaagtgtcctcctattgaagacagtcttttatcgcacagatataaagactatgtggttaaatgggagaggctagaaaagaatagacggcgacaggtttctaataaacgtgttaaacatggtgatttatggatagccaactatacatctaaattcagtaaccgtaggtatttgtgtaccgtaactacaaagaatggtgactgtgttcagggtatagttagatctcatattaaaaaacctccttcatgcattccaaaaacatatgaactaggtactcatgataagtatggcatagacttatactgtggaattctttacgcaaaacattataataatataacttggtataaagataataaggaaattaatatcgacgacattaagtattcacaaacgggaaagaaattaattattcataatccagagttagaagatagtggaagatacaactgttacgttcattacgacgacgttagaatcaagaatgatatcgtagtatcaagatgtaaaatacttacggttataccgtcgcaagaccacaggtttaaactaatactagatccaaaaatcaacgtaacgataggagaacctgccaatataacatgcactgctgtgtcaacgtcattattgattgacgatgtactgattgaatgggaaaatccatccggatggcttataggattcgattttgatgtatactctgttttaactagtagaggcggtattaccgaggcgaccttgtactttgaaaatgttactgaagaatatataggtaatacatataaatgtcgtggacacaactattattttgaaaaaacccttacaactacagtagtattggagtaaatacacaatgcatttttatatacattactgaataattattattattatttatatcgtatttgtgctataacgcgactatctaggtatttgtatctcactgatagagaacatataaatatagactctattaaacagttgtgtaaaatatcaaatcctaatagatgtggatgtacggctttacatgagtacttttataattatagatcagtcaacggaaaatacaagtatagatacaacggttactatcaatattatttatctagcgattatgaaaattataatgaatattattatgatgattatgatagaactggtatgaacagtgagagtgataatatatcaatcaaaacagaatatgaattctatgatgaaacacaagatcaaagtacacaactagtaggttacgacattaaactcaaaaccaatgaggatgattttatggctatgatagatcagtgggtgtccatgattatatagatgaatcaattaataaagtagtatatggaagagagtctcacgtaagatggcgggatatatggcaagaacataatgatggcgtatacagtataggaaaggagtgcatagataatatatacgaagacaaccataccgtagacgaattctacaagatagacagcgtatcagatgtagatgacgcggaacacatatctccgataactaatgatgtatctacacaaacatgggaaaagaaatcagagttagatagatacatggaaatgtatcctcgtcatagatatagtaagcattctgtctttaagggattttctgacaaagttagaaaaaatgatttagacatgaatgtggtaaaagaattactttctaacggtgcatctctaacaattaaggatagcagtaataaggatccaataaccgtttattttcgaagaacgataatgaatttagaaatgattgatattattaacaaacatacaactattgatgaacgaaagtatatagtacactcctatctaaaaaattataaaaatttcgattatccatttttcaggaagttagttttgactaataaacattgtctcaacaattattataatataagcgacagcaaatatggaacaccgctacatatattggcgtctaataaaaaattaataactcctaattacatgaagttattagtgtataacggaaatgatataaacgcacgaggtgaagatacacaaatgcgaactccattacacaaatatttgtgtaaatttgtatatcataatattgaatatggtatccgatactataatgaaaagattatagacgcatttatagagttaggagccgatctaactattccaaataacgatggaatgataccagtagtttactgtatacactcaaatgcagaatatggttataacaatattactaacataaagataatacgtaaactacttaatcttagtagacgtgcgtcacataatctatttagagatcgagtcatgcacgattatataagtaatacatatattgatcttgagtgtttagatattattagatcgttggatggattcgatatcaatggttactttgaaggacgtacaccacttcattgcgctatacaacataacttcactcagattgctaagtacttattagatcgaggagctgatatagtcgtacccaacacattgattatacatcagtacatacagtaaatagcatagatatggaggaggatacaaatatttcaaataaagttataaggtacaacactgtcaataatatatggaagacattacctaacttctggactggaactataaatccaggcgtggtctcgcataaagatgatatatatgttgtatgcgacatcaaagatgaaaaaaatgttaagacttgtatatttagatataacacgaatacgtataacggatgggaattggttacgacgacagaaagcagattatcagctctgcatactattcttcatgacaataccataatgatgttacattgttatgaatcgtatatgttacaagatacatttaatgtgtacactcgcgaatggaatcatatgtgtcatcaacattcgaatagttatatcatgtacaatatactacccatctactaaatataatagaataaaataaatgagtatgatcattttagataacgattgattttatcattaccgcttcattcttatattctttgcttacggaacctatatttagaaacatctactaacgattttttatgcttgcattattaatggtatgtaatatgattgattgtgtacgcaataccaatttgttaagtatgaatacggggtacaaacataaactgaaatttaacattatttatttatgatatatatcgttatcgttattgtttggtctataccatggatatctttaaagaactaatcttaaaacaccctgatgaaaatgttttgatttctccagtttctattttatctactttatctattctaaatcatggagcagctggttctacagctgaacaactatcaaaatatatagagaatatgaatgagaatacacccgatgataagaaggatgacaataatgacatggacgtagatattccgtattgtgcgacactagctaccgcaaataaaatatacggtagcgatagtatcgagttccacgcctccttcctacaaaaaataaaagacgattttcaaactgtaaactttaataatgctaaccaaacaaaggaactaatcaacgaatgggttaagacgatgacaaatggtaaaattaattccttattgactagtccgctatccattaatactcgtatgacagttgttagcgccgtccattttaaagcaatgtggaaatatccattttctaaacatcttacatatacagacaagttttatatttctaagaatatagttaccagtgttgatatgatggtgggtaccgagaataacttgcaatatgtacatattaatgaattattcggaggattctctattatcgatattccatacgagggaaactctagtatggtaattatactaccggacgacatagaaggtatatataacatagaaaaaaatataacagatgaaaaatttaaaaaatggtgtggtatgttatctactaaaagtatagacttgtatatgccaaagtttaaagtggaaatgacagaaccgtataatctggtaccgattttagaaaatttaggacttactaatatattcggatattatgcagattttagcaagatgtgtaatgaaactatcactgtagaaaaatttctacatacgacgtttatagatgttaatgaggagtatacagaagcatcggccgttacaggagtatttatgactaacttttcgatggtatatcgtacgaaggtctacataaaccatccattcatgtacatgattaaagacaacacaggacgtatactttttatagggaaatactgctatccgcaataaatataaacaaatagacttttatcacgtttatctatgtctaaatattacaaatagtaatagtataaactaaagctgataatacttaaaaaaataataatatcatttacaattaatagtataaactaaaaattaaacaaatcgttattataagtaatatcaaaatgatgatatacggattaatagcgtgtcttatattcgtgacttcatccatcgctagtccactttatattcccgttattccacccattacggaagataaatcgttcaatagtgtagaggtattagtttccttgtttagagatgaccaaaaagactatacggtaacttctcagttcaataactacactatcgataccaaagactggactatcggcgtactatccacacctgatggtttggatataccattgactaatataacttattggtcacggtttactataggtcgtgcattgttcaaatcagagtctgaggatattttccaaaagaaaatgagtattctaggtgtttctatagaatgtaagaagtcgtcgacattacttacttttttgaccgtgcgtaaaatgactcgagtatttaataaatttccagatatggcttattatcgaggagactgtttaaaagccgtttatgtaacaatgacttataaaaatactaaaactggagagactgattacacgtacctctctaatggggggttgcctgcatactatcgtaatggggtcgatggttgattattgattagtatattccttattcacacaaaaagaacatttttataaacatgaaaccactgtctaaatgtaattatgatcttgatttatagatgaagatcagcctttagaggattttaaccagtatgtttaatatgaaaaaaataaacataacatattttgagattaagcgctattgtgcttaattattttgctctataaactgaatatatagccacaattattgacgggcttgtttatgaccggcaatcatgaatttacagaaattatctctggctatatatcttactgcgacatgttcgtggtgttatgaaacatgcataagaaaaactgcgttgtatcatgacattcaattggagcatgtagaagacaataaagatagtgtagcgtcgctaccgtacaagtagtcaatcaaagagaacgtagtagattgttggctacatttaattggacagatatagctgagggtgttagaaatgagttcattaaaatatgtgatatcaacggaacatatttatataattatactattgctgttagtataattattgattccacggaagaactaccaacagttactccaattacaacaacatatgaaccttctacatataattatactatcgatgatagcactgttattactactgaagaactacaagtgactcctcatatggatctccatcgatgatacatgtattaaaatactttccgaataagtcttttaaatattgtattaattatgaaaaactatgctatgcgagtatgatgcaaagatgtttaatgatacgatactagattttatctctagcgagagatgtcgttagaatcatttatcataactacgtttaataataattcatcaacgaatatcgataacatgtgtcatttatacgttaaagtctgtccgtcttctctattgtttagactgtttgtagaatgctgtgatataaacaaactagtagaaggtacgactccgttacactgttatctaatgaatgaaggatttgaatcatctgttttaaaaaacctattaaaggagtatgtcatgaatacgtttaatgttcatgacatccattacacaaatatttaactcatgatgaagttgagaatgatatgctttctgatagtatagatagctttagctaatataaaaatatattaatccactatatattctagacttgatttaaaaccgataaactactactacgtactgtataagttgttaaaaaaaggagcagaccctaattatgtagatgatagaggtaatacttttcttcattacttctgcatctatatgtccacttatgagaaaacgtcatttaataagatgcatcgtgaaaagaaatttattaaagagttggtaaaatatgaaaccgaaagtaaataatataggaaatacacctctacataactacgtatctcaatatgatatcactctcattcctcatccacaacccattaaaaaaatggaaattaaagccctctattagcataaacggctacaggtctacctttacaatggcctctccttgtgcccagttcagaccctgtcattgccacgctactaaggactccctgaataccgtggccgacgtcagacattgtctgactgaatacatcctgtgggtttctcatagatggacccatagagaaagcgcagggtctctctacaggcttctcatctctttcagaactgatgcaacggagctctttggtggtgagttgaaggattcacttccgtgggacaatatcgacaattgcgtggagatcattaaatgtttcatcagaaatgactccatgaaaaccgccgaagaacttcgtgcaatcattggactttgtactcaatcagctatcgtctctggaagagtcttcaacgataagtatatcgacatactacttatgctgcgaaagattctgaacgagaacgactatctcaccctcttggatcatatccgcactgctaaatactaaatctccttcatgctctctcactacactttttatcatcttatgaggaatgattgccttcatcatttttcgtgaaataggaataattagcaccagaatagctatggattgcacatgtattctatgtcgtctactggatgaagatgtgacgtacaaaaaaataaaactagaaattgaaacgtgtcacaacttatcaaaacatatagatagacgaggaaacaatgcgctacattgttacgtcttcaataaatgcgatacagacattaagattgttcgactgttactctctcgcggagtcgagagactttgtagaaacaacgaaggattaactccgctaggagcatacagtaagcatagatacgtaaaatctcaaattgtgcatctactgatatccagctattcgaattcctctaacgaactcaagtcgaatataaatgatttcgatctgtattcgtatatgtcttcggataatatcgacttacgtctgctaaaatacctaattgtggataaacggatacgtccgtccaagaatacgaattatgcaatcaatggtctcggattggtggatatatacgtaacgacgcctaatccgagaccagaagtattgctatggcttcttaaatcagaatgttacagcaccggttacgtatttcgtacctgtatgtacgacagtgatatgtgtaagaactctcttcattactatatatcgtctcatagagaatctcaatctctatccaaggatgtaattaaatgtttgatcaataacaatgtttccatccatggcagagacgaaggaggatctttacccatccaatactactggtcttgctcaaccatagatatagagattgttaaattattaataaaggatgtggacacgtgtagagtatacgacgtcagccctatattagaggcggattatctaaacaagcgatttagagtaaccccatataatgtagacatggaaatcgttaatcttcttattgagagacgtcatactcttgtcgacgtaatgcgtagtattacttcttacgattccagagactataaccactacatcatcgataacattctaaagagatttagacaacaggatgaatccatcgtacaagccatgttgataaactacttacattacggcgatatggtcgttcgatgcatgttagataacggacaacaactatcctctgcacgactactttgttaataataatctcgtcgatgtaaacgtcgtaaggtttatcgtggaaaataatggacacatggctgtaaatcacgtatcgaacaatggccgtctatgtatgtacggtctgatattatcgagatttaataattgcgggtatcactgttatgaaaccatactaatagatgtatttgatatactaagcaagtacatggataatatagatatgatcgataatgagaataaaactctactatattacgcggtcgatgtcaataatatacaatttgcaaagcggttattggaatatggagcgagtgttacaacatcacgctcgataatcaatacggccatccagaaaagtagttacagaagagaaaacaaaacgaggatagttgatttattacttagctaccatcccactctagagactatgattgacgcatttaatagagatatacgctatctatatcctgaaccattattcgcctgtatcagatacgccttaatcctagatgatgattttccttctaaagtaagtatgatatctccggtcgtcataaggaactaaagcgctatagagtagacattaatagaatgaagaatgcctacatatcaggcgtctccatgtttgatatattatttaaacgaagcaaacgccacagattgagatacgcaaagaatccgacatcaaatggtacaaaaaagaactaacgtccatcattacagaaactgtaaagaacaatgagaggatcgactccatagtggacaacattaatacagacgataacttgatttcgaaattacccatggagatactttattactccattaaataatttatcatggagcgataatgtcctgtttcatttgtttccatgacatattacaaaatcgattccgtccaagatgataaaaacatttaccggcatcataaacacggagtttattttatatgtctcgcataaacattactaaaaaaatatattgttcggttttctttcacatctttaattatgaaaaagtaaatcattatgagatggacgagattgtacgcatcgttcgcgacagtatgtggtacatacctaacgtatttatggacgacggtaagaatgaaggtcacgtttctgtcaacaatgtttgtcatatgtattttacgttctttgatgtggatacatcgtctcatctgtttaagctagttattaaacactgcgatctgaataaacgaggtaactctccattacattgctatacgatgaatacacgatttaatccatctgtattaaagatattgttacaccacggcatgcgtaactttgatagcaaggatgaaaaaggacatattcctctacaccactatctgattcattcactatcaatcgataacaagatctttgatatactaacggacaccattgatgactttagtaaatcatccgatctattgctgtgttatcttagatataaattcaatgggagcttaaactattacgttctgtacaaaggatccgaccctaattgcgtcgacgaggatggactcacttctcttcattactactgtaaacacatatccacgttctacaaaagcaattattacaagttaagtcacactaagatgcgagccgagaagcgattcatctacgcgataatagattatggagcaaacattaacgcggttacacacttaccttcaacagtataccaaacatagtcctcgtgtggtgtatgctcttttatctcgaggagccgatacgaggatacgtaataatcttgattgtacacccatcatggaacgattgtgcaacaggtcatattctcataatgttactcaattggcacgaacaaaaggaagaaggacaacatctactttatctattcataaaacataatcaaggatacactctcaatatactacggtatctactagataggttcgacattcagaaagacgaatactataataccgcctttcaaaattgtaacaacaatgttgcctcatacatcggatacgacatcaaccttccgactaaagacggtattcgacttggtgtttgaaaacagaaacatcatatacaaggcggatgttgtgaatgacatcatccaccacagactgaaagtatctctacctatgattaaatcgttgttctacaagatgtcagaattctctccctacgacgattactacgtaaaaaagatactagcctactgcctattaagggacgagtcattcgcggaactacatagtaaattctgtttaaacgaggactataaaagtgtatttatgaaaaatatatcattcgataagatagattccatcatcgtgacataagtcgccttaaagagattcgaatctccgacaccgacctgtatacggtatcacagctatcttaaagccatacattcggacagacacatttcatttcccatgtacgacgatctcatagaacagtgccatctatcgatggagcataaaagtaaactcgtcgacaaagcactcaataaattagagtctaccatcggtcaatctagactatcgtatttgcctccggaaattatgcgcaatatcatctaaacagtatgttgtacggaaagaaccattacaaatattatccatgatagaaagaaaatatctatatgattggagaagtaggaaacaggaacaagacgacgattactacattattaaatcatgaagtccgtattatactcgtatatattgtttctctcatgtataataataaacggaagagatatagcaccgcatgcaccatccgatggaaagtgtaaagacaacgaatacaaacgccataatttgtgtccgggaacatacgcttccagattatgcgatagcaagactaacacacgatgtacaccctgtggttcgggtaccttcacatctcgcaataatcatttacccgcttgtctaagttgtaacggaagacgcgatcgtgtaacacgactcacaatagaatctgtgaatgctctcccggatattattgtcttctcaaaggatcatccggatgcaaggcatgtgtttcccaaacaaaatgtggaataggatacggagtatccggagacgtcatctgttctccgtgtggtctcggaacatattctcacaccgtctcttccgcagataaatgcgaacccgtacccagtaatacctttaactatatcgatgtggaaattaatctgtatcccgtcaacgacacgtcgtgtactcggacgaccactaccggtctcagtgaatccatctcaacgtcggaactaactattactatgaatcataaagactgtaatcccgtatttcgtgaggaatacttctctgtccttaataaggtagcaacttcaggtttctttacaggagaaaggtgtgcactctgaatttcgagattaaatgcaataacaaagattcttcctccaaacagttaacgaaagcaaagaatgatgacggtatcatgccgcattcggagacagtaactctagtgggcgactgtatatctagcgtcgacatctatatactatatagtaataccaatactcaagactacgaaactgatacaatctcttatcatgtgggtaatgttctcgatgtcgatagccatatgcccggtagttgcgatatacataaactgatcactaattccaaacccacccgctttttatagtaagtttttcacccataaataataaatacaataattaatttctcgtaaaagtagaaaatatattctaatttattgcatggtaaggaagtagaatcataaagaacagtactcaatcaatagcaattatgaaacaatatatcgtcctggcatgcatgtgcctgccagtcttcagcaatcatcctcatcctcatcctcgtgtacggaagaagaaaacaaacatcatatgggaatcgatgttattatcaaagtcacaaagcaagaccaaacaccgaccaatgataagatttgccaatccgtaacggaaattacagagtccgagtcagatccaaatcccgaggtggaatcagaagatgattccacatcagtcgaggatgtagatcctcctaccacttattactccatcatcggtggaggtctgagaatgaactttggattcaccaaatgtcctcagattaaatccatctcagaatccgctgatggaaacacagtgaatgctagattgtccagcgtgtccccaggacaaggtaaggactctcccgcgatcactcatgaagaagctcttgctatgatcaaagactgtgaggtgtctatcgacatcagatgtagcgaagaagagaaagacagcgacatcaagacccatccagtactcgggtctaacatctctcataagaaagtgagttacgaagatatcatcggttcaacgatcgtcgatacaaaatgtgtcaagaatctagagtttagcgttcgtatcggagacatgtgcaaggaatcatctgaacttgaggtcaaggatggattcaagtatgtcgacggatcggcatctgaaggtgcaaccgatgatacttcactcatcgattcaacaaaactcaaagcgtgtgtctgaatcgataactctattcatctgaaattggatgagtagggttaatcgaacgattcaggcacaccacgaattaaaaaagtgtaccggacactatattccggtttgcaaaacaaaaatgttcttaactacattcacaaaaagttacctctcgcgacttcttctttttctgtctcaatagtgtgatacgattatgacactattcctattcctattcctatttcctttcagggtatcacaaaaatattaaacctctttctgatggtctcataaaaaaagttttacaaaaatatttttattctctttctctctttgatggtctcataaaaaaagttttacaaaaatatttttattctctttctctctttgat

SEQ ID NO: 94 - DNA, 33 bp, synthetic construct; identical to SEQ ID NO: 14
  source 1..33: mol_type = other DNA
  misc_feature 1..33: note = Forward primer left flank B2R

SEQ ID NO: 95 - DNA, 55 bp, synthetic construct; identical to SEQ ID NO: 15
  source 1..55: mol_type = other DNA
  misc_feature 1..55: note = Reverse primer left flank B2R

SEQ ID NO: 96 - DNA, 56 bp, synthetic construct; identical to SEQ ID NO: 16
  source 1..56: mol_type = other DNA
  misc_feature 1..56: note = Forward primer right flank B2R

SEQ ID NO: 97 - DNA, 38 bp, synthetic construct; identical to SEQ ID NO: 17
  source 1..38: mol_type = other DNA
  misc_feature 1..38: note = Reverse primer right flank B2R

SEQ ID NO: 98 - protein, 759 aa, synthetic construct
  REGION 1..759: note = MDNA11T aa sequence
MYRMQLLSCIALSLALVTNSAPTSSSTKKTQLQLEHLLLDLQMILNGINNYKNPKLTRMLTAKFYMPKKATELKHLQCLEEALKPLEEVLNLAQSKNFHFDPRDVVSNINVFVLELKGSETTFMCEYADETATIVEFLNRWITFCTSIISTLTGGGGSGGGGSGGGGSRGVFRRDAHKSEVAHRFKDLGEENFKALVLIAFAQYLQQCPFEDHVKLVNEVTEFAKTCVADESAENCDKSLHTLFGDKLCTVATLRETYGEMADCCAKQEPERNECFLQHKDDNPNLPRLVRPEVDVMCTAFHDNEETFLKKYLYEIARRHPYFYAPELLFFAKRYKAAFTECCQAADKAACLLPKLDELRDEGKASSAKQRLKCASLQKFGERAFKAWAVARLSQRFPKAEFAEVSKLVTDLTKVHTECCHGDLLECADDRADLAKYICENQDSISSKLKECCEKPLLEKSHCIAEVENDEMPADLPSLAADFVESKDVCKNYAEAKDVFLGMFLYEYARRHPDYSVVLLLRLAKTYETTLEKCCAAADPHECYAKVFDEFKPLVEEPQNLIKQNCELFEQLGEYKFQNALLVRYTKKVPQVSTPTLVEVSRNLGKVGSKCCKHPEAKRMPCAEDYLSVVLNQLCVLHEKTPVSDRVTKCCTESLVNRRPCFSALEVDETYVPKEFNAETFTFHADICTLSEKERQIKKQTALVELVKHKPKATKEQLKAVMDDFAAFVEKCCKADDKETCFAEEGKKLVAASQAALGL

SEQ ID NO: 99 - protein, 125 aa, Homo sapiens
  REGION 1..125: note = Human CXCL9 (hCXCL9)
MKKSGVLFLLGIILLVLIGVQGTPVVRKGRCSCISTNQGTIHLQSLKDLKQFAPSPSCEKIEIIATLKNGVQTCLNPDSADVKELIKKWEKQVSQKKKQKNGKKHQKKKVLKVRKSQRSRQKKTT

SEQ ID NO: 100 - protein, 153 aa, synthetic construct
  REGION 1..153: note = IL-2 Superkine (H9, Super-2)
MYRMQLLSCIALSLALVTNSAPTSSSTKKTQLQLEHLLLDLQMILNGINNYKNPKLTRMLTFKFYMPKKATELKHLQCLEEELKPLEEVLNLAQSKNFHFDPRDVVSNINVFVLELKGSETTFMCEYADETATIVEFLNRWITFCQSIISTLT

SEQ ID NO: 101 - protein, 759 aa, synthetic construct
  REGION 1..759: note = MDNA11
MYRMQLLSCIALSLALVTNSAPTSSSTKKTQLQLEHLLLDLQMILNGINNYKNPKLTRMLTAKFYMPKKATELKHLQCLEEALKPLEEVLNLAQSKNFHFDPRDVVSNINVFVLELKGSETTFMCEYADETATIVEFLNRWITFCQSIISTLTGGGGSGGGGSGGGGSRGVFRRDAHKSEVAHRFKDLGEENFKALVLIAFAQYLQQCPFEDHVKLVNEVTEFAKTCVADESAENCDKSLHTLFGDKLCTVATLRETYGEMADCCAKQEPERNECFLQHKDDNPNLPRLVRPEVDVMCTAFHDNEETFLKKYLYEIARRHPYFYAPELLFFAKRYKAAFTECCQAADKAACLLPKLDELRDEGKASSAKQRLKCASLQKFGERAFKAWAVARLSQRFPKAEFAEVSKLVTDLTKVHTECCHGDLLECADDRADLAKYICENQDSISSKLKECCEKPLLEKSHCIAEVENDEMPADLPSLAADFVESKDVCKNYAEAKDVFLGMFLYEYARRHPDYSVVLLLRLAKTYETTLEKCCAAADPHECYAKVFDEFKPLVEEPQNLIKQNCELFEQLGEYKFQNALLVRYTKKVPQVSTPTLVEVSRNLGKVGSKCCKHPEAKRMPCAEDYLSVVLNQLCVLHEKTPVSDRVTKCCTESLVNRRPCFSALEVDETYVPKEFNAETFTFHADICTLSEKERQIKKQTALVELVKHKPKATKEQLKAVMDDFAAFVEKCCKADDKETCFAEEGKKLVAASQAALGL

SEQ ID NO: 102 - protein, 543 aa, Mus musculus
  REGION 1..543: note = mscIL-12 (mouse single chain IL-12)
MCPQKLTISWFAIVLLVSPLMAMWELEKDVYVVEVDWTPDAPGETVNLTCDTPEEDDITWTSDQRHGVIGSGKTLTITVKEFLDAGQYTCHKGGETLSHSHLLLHKKENGIWSTEILKNFKNKTFLKCEAPNYSGRFTCSWLVQRNMDLKFNIKSSSSSPDSRAVTCGMASLSAEKVTLDQRDYEKYSVSCQEDVTCPTAEETLPIELALEARQQNKYENYSTSFFIRDIIKPDPPKNLQMKPLKNSQVEVSWEYPDSWSTPHSYFSLKFFVRIQRKKEKMKETEEGCNQKGAFLVEKTSTEVQCKGGNVCVQAQDRYYNSSCSKWACVPCRVRSGGGGSGGGGSGGGGSRVIPVSGPARCLSQSRNLLKTTDDMVKTAREKLKHYSCTAEDIDHEDITRDQTSTLKTCLPLELHKNESCLATRETSSTTRGSCLPPQKTSLMMTLCLGSIYEDLKMYQTEFQAINAALQNHNHQQIILDKGMLVAIDELMQSLNHNGETLRQKPPVGEADPYRVKMKLCILLHAFSTRVVTINRVMGYLSSA

SEQ ID NO: 103 - protein, 532 aa, Homo sapiens
  REGION 1..532: note = hscIL-12 (human single chain IL-12)
MCHQQLVISWFSLVFLASPLVAIWELKKDVYVVELDWYPDAPGEMVVLTCDTPEEDGITWTLDQSSEVLGSGKTLTIQVKEFGDAGQYTCHKGGEVLSHSLLLLHKKEDGIWSTDILKDQKEPKNKTFLRCEAKNYSGRFTCWWLTTISTDLTFSVKSSRGSSDPQGVTCGAATLSAERVRGDNKEYEYSVECQEDSACPAAEESLPIEVMVDAVHKLKYENYTSSFFIRDIIKPDPPKNLQLKPLKNSRQVEVSWEYPDTWSTPHSYFSLTFCVQVQGKSKREKKDRVFTDKTSATVICRKNASISVRAQDRYYSSSWSEWASVPCSGGGGGGSRNLPVATPDPGMFPCLHHSQNLLRAVSNMLQKARQTLEFYPCTSEEIDHEDITKDKTSTVEACLPLELTKNESCLNSRETSFITNGSCLASRKTSFMMALCLSSIYEDLKMYQVEFKTMNAKLLMDPKRQIFLDQNMLAVIDELMQALNFNSETVPQKSSLEEPDFYKTKIKLCILLHAFRIRAVTIDRVMSYLNAS

SEQ ID NO: 104 - protein, 153 aa, synthetic construct
  REGION 1..153: note = IL-2 superkine H9T
MYRMQLLSCIALSLALVTNSAPTSSSTKKTQLQLEHLLLDLQMILNGINNYKNPKLTRMLTFKFYMPKKATELKHLQCLEEELKPLEEVLNLAQSKNFHFDPRDVVSNINVFVLELKGSETTFMCEYADETATIVEFLNRWITFCTSIISTLT

SEQ ID NO: 105 - protein, 153 aa, Homo sapiens
  REGION 1..153: note = human IL-2 (hIL-2)
MYRMQLLSCIALSLALVTNSAPTSSSTKKTQLQLEHLLLDLQMILNGINNYKNPKLTRMLTFKFYMPKKATELKHLQCLEEELKPLEEVLNLAQSKNFHLRPRDLISNINVIVLELKGSETTFMCEYADETATIVEFLNRWITFCQSIISTLT

SEQ ID NO: 106 - protein, 126 aa, Mus musculus
  REGION 1..126: note = Mouse CXCL9 (mCXCL9)
MKSAVLFLLGIIFLEQCGVRGTLVIRNARCSCISTSRGTIHYKSLKDLKQFAPSPNCNKTEIIATLKNGDQTCLDPDSANVKKLMKEWEKKISQKKKQKRGKKHQKNMKNRKPKTPQSRRRSRKTT
